United States Patent Application Publication US 2009/0215178 A1 - sequence listing, part 3

SEQ ID NO: 1835 - DNA, 3054 bp, Homo sapiens
agttgagtctgcggagccgcgggcagtggcagtcaggcctccccgctctgtgctacctgcggcccggctctcctccgcgcccccactcgcgctgcgatgacgcgctcactgttcaagggaaacttttggagtgcagacatcctcagcaccatcggctatgacaacattatccaacatctgaacaatggccgcaagaactgcaaagagtttgaagactttctaaaagaaagggcagcaattgaagagaggtatggcaaagatctgctcaacctctctaggaagaagccgtgtggacagtctgaaatcaacaccctgaagcgggcccttgaagtcttcaagcagcaagtagacaatgtggcacaatgtcacattcagcttgcacagagtttaagagaagaggccaggaagatggaagaattcagggaaaagcaaaaactacaacgaaaaaagacagagctcataatggatgctatccataaacaaaagagcttacaattcaagaaaaccatggatgcaaagaagaactatgagcagaaatgccgggacaaagatgaggcagaacaggccgtcagccggagtgccaacctggtgaacccgaagcaacaagaaaagctttttgtgaaactggcaacttcaaagaccgcagtagaggactcagacaaagcatacatgctgcacatcggcaccctggataaggtccgagaagagtggcagagtgagcacatcaaggcctgcgaggcatttgaggctcaagaatgtgaacgaataaacttcttccggaatgcattgtggttacatgtgaatcagctgtcacaacaatgtgtcaccagtgatgaaatgtacgaacaagtccgaaagagtttagaaatgtgcagcattcagagggacattgaatactttgtgaatcaacgcaaaactggacagattccaccagcacccatcatgtatgagaatttctactcctcccagaagaatgcagtcccagcaggaaaggctacagggcctaacttggcaaggagaggacccctcccaattcctaaaagctcaccagatgatcccaattactctttggttgatgactacagtttgctctatcagtaaaatcaatgaaaccagagctttttccggctagtgcttctgtgatatggaaagggcacccagagcagcaggacctatagccacgttatgtcagcaatgaagactttgaagtgaacccttgctataattttttagagatttaaaatttatggtagacatttaggacaacataagcaagtagagttctgcagttttttgaagtttacaaattgccccattctgaagaattattctttcccagttactcaggttatgaatgaattaggttttcaacatgggaagcatgaaatccacttctggatttggagcatccacttgaggagcagaggtggcagcagaggattctgagccaccaactgcagtagtggctcctttggctttgggcagcctggctgtggagtttccacggcgacacacagcctcagtggtgcaagatttaaaattaccttcctttttggctggaagacttagaagccgcctgatcatactttctcattttacagatgaggaaataaagcctacaagtgtgaaattaatttccttacagttttcctagctgatgagggacagaaccagaactagagcctgagcccaacccacatcactattcttctaacccttcctgaagttgtgatgctcatgctgaaatttaagatgccaaatatttttgccagcactttttcagttgggagaatcaccagggtttaaatgtcagatttatttttatgtggatccctgtgtatgctgaactacagagcatgatgtttaatctaatttaaggagccactgattgtaaaacatgccattattttatgttgcactaagaaggtggggtcgaggagttgccaataaacttgggacagactattgatggccaagcccatctgaatttaagatgctaaagtatgaaaaaaatacatcttagaatcaatgaaataccatattttgattccattcctcaagataattttagagttataaaaccagtcctcaattttgggtcttcacagagaatctttcccttgctagaccccagaattttaaatgcatccgtcttacactttcacaaatatttgggttttcctttttcactcacaaacagcagggaggtcatgtactttttgtacaacacctgtgcactatgagaaaatggtaccttttagttattgacaagttaaaatagcactctcagtttttcagtattacagagagcaaatagtttcctctcctgctctgtgcagtagcttttccagaactatggacaaattgatcagaagaagattgattatttcctcatctttttttcttttttttgagacagagtctctctctgtcccccaggctgaagtgcagcggcatgatctcagctcactgcaacctctgcctcccgggttcaagtgattctcctgcctcagcctcctgagtagctgggattacaggcacccaccaccacacctggctaattttttgtatttttagtaaagacagggttttaccatgttggtcaggctggtctcaaactcctgacctcaggtgatccacctgcctcggcctcccaaagtgctgggattacaggcgtgagccactgcgcccggcctatttccccacctttcgtgtaaggtgctactgaacatgacagcttcttgtcatgacaggaaacttgcatcagttggatatccttttgagaaactgaattttgcaaagggccaaatttccccaaactgaacgggctcaggaaatgttcctttacactcagaacattctattttaagtatattatttattgttggcagttcctcagggatttcccttttctctgtattggtcagtgtagttgatgtaaaaccgttttgtggatggaaaatatttttattttattgctcttttagtttggtaggttaaataaaggttcttggtaatttgggaaaaaaaaaaaaaaaaaaaaaaaaaaaaaaa

SEQ ID NO: 1836 - DNA, 1748 bp, Homo sapiens
gctgaagccgctgcccctgctacaggcaccaccaggaccagctgatcattccagcccacagcaatggagccacatgactcctcccacatggactctgagttccgatacactctcttcccgattgtttacagcatcatctttgtgctcggggtcattgctaatggctacgtgctgtgggtctttgcccgcctgtacccttgcaagaaattcaatgagataaagatcttcatggtgaacctcaccatggcggacatgctcttcttgatcaccctgccactttggattgtctactaccaaaaccagggcaactggatactccccaaattcctgtgcaacgtggctggctgccttttcttcatcaacacctactgctctgtggccttcctgggcgtcatcacttataaccgcttccaggcagtaactcggcccatcaagactgctcaggccaacacccgcaagcgtggcatctctttgtccttggtcatctgggtggccattgtgggagctgcatcctacttcctcatcctggactccaccaacacagtgcccgacagtgctggctcaggcaacgtcactcgctgctttgagcattacgagaagggcagcgtgccagtcctcatcatccacatcttcatcgtgttcagcttcttcctggtcttcctcatcatcctcttctgcaacctggtcatcatccgtaccttgctcatgcagccggtgcagcagcagcgcaacgctgaagtcaagcgccgggcgctgtggatggtgtgcacggtcttggcggtgttcatcatctgcttcgtgccccaccacgtggtgcagctgccctggacccttgctgagctgggcttccaggacagcaaattccaccaggccattaatgatgcacatcaggtcaccctctgcctccttagcaccaactgtgtcttagaccctgttatctactgtttcctcaccaagaagttccgcaagcacctcaccgaaaagttctacagcatgcgcagtagccggaaatgctcccgggccaccacggatacggtcactgaagtggttgtgccattcaaccagatccctggcaattccctcaaaaattagtccctgcttccaggcctgaagtcttctcctccatgaacatcatggactgagctgggggaagaagggatatctactgtggtctgggcaccacctctgtgggcactggtgggccattagatttggaggctacctcacctgggcagggatgatggcagagccaggctgttggaaaatccagaactcaaatgagccccttcatccgcctgtgggcgcatactacagtaactgtgactgatgactttatcctgagtcccttaatcttatggggccggaaggaatgtcagggccaggtgcagaccttgggggaagactttaaaccacctagttctccccgatggggcatcggtctaaagctttgggggagtgggcgcagtggctcacacctgtaatcccagcactttgggaggccgaggtgggcagatcatgggtcaagagatcgagaccatcctggccaacattgtaaaaccccatctctactaaaacatacaaaaattagccgggcatggtggcacacgcctgtagtcccagctactcaggaggctgaggcaggagaatcgcttgaacctgggaggcagaggttgcagtgaacctagattgcaccattgcactctagcctggcaacagagcgagattccatctcaaaaaaaaaaaaaaaa

SEQ ID NO: 1837 - DNA, 982 bp, Homo sapiens
taccattctgatgttggcgcggacgtgtctgggctgtgcggccgcctaggtgtctgggcgatctatgggcaagagcaagggccacgatgacagattacggcgaggagcagcgcaacgagctggaggccctggagtccatctaccctgactccttcacagtattatcagaaaatccacccagcttcaccattactgtgacgtctgaggctggagaaaatgatgaaactgtccagactaccctcaagtttacatacagtgaaaaatacccagatgaagctcccctttatgaaatattctcccaggaaaatctagaagataatgatgtctcagacattttaaaattactagcattacaggctgaagaaaatcttggtatggtgatgatttttactctagtgacagctgtgcaagaaaaattaaatgaaatagtagatcagataaaactagaagagagaagaaagaacaaaagaaaagaagcagaagaagctgaaaagcaattattccatggtactccagttacaattgagaatttcttaaattggaaagccaagtttgatgcagaactcttggaaattaaaaagaaaaggatgaaagaagaagaacaagcaggaaaaaataaattaagtgggaaacaactatttgaaacagatcataatcttgacacatctgatatccagttcttggaggatgctggaaacaacgtggaggtagatgagtctttgttccaagaaatggatgacttggagctggaggatgatgaagatgatccagactataatcctgctgacccagagagtgactcagctgactaatggactgtccccatctgcagagaggcttgactgccacagcatctgtggctatgctcagagggttatgattttcctttctttttttctaagaaaaaattattttcaggagaatattcttctgatagctttcatcattgaacttaataaactgaccttaaaatttcaaatat

SEQ ID NO: 1838 - DNA, 2473 bp, Homo sapiens
caatgcaccgcacaccctttactggccggccccgcgctgctctcctaagaccccgcgggccagcgccgcgaccccttcccagcgctcctcgcgctgtgtgcggcgcgtcctctcgccggtgacccggtgtgcgtggggtcgaggcgccgggcggagtggctccgggccgaaacgccatgcggaggggcgagcgcagggacgccggaggtccgcggcccgagtccccggtgcccgcgggcagggcctcgctggaggagccgcctgacgggccgtctgccggccaagccaccgggccgggcgagggccgccgcagcaccgagtccgaggtctacgacgacggcaccaacaccttcttctggcgagcccacaccttaaccgtgctcttcatcctcacctgtacgcttggctatgtgacgctgctggaggaaacacctcaggacacggcctacaacaccaagagaggtattgtggccagtattttggttttcttatgttttggagtcacacaagctaaagacgggccattttccagacctcatccagcttactggaggttttggctctgcgtgagtgtggtctacgagctgtttctcatctttatactcttccagactgtccaggacggccggcagtttctaaagtatgttgaccccaagctgggagtcccactgccagagagagactacgggggaaactgcctcatctacgacccagacaatgagactgacccctttcacaacatctgggacaagttggatggctttgttcccgcgcactttcttggctggtacctgaagaccctgatgatccgagactggtggatgtgcatgatcatcagcgtgatgttcgagttcctggagtacagcctggagcaccagctgcccaacttcagcgagtgctggtgggatcactggatcatggacgtgctcgtctgcaacgggctgggcatctactgcggcatgaagacccttgagtggctgtccctgaagacgtacaagtggcagggcctctggaacattccgacctacaagggcaagatgaagaggatcgccttccagttcacgccgtacagctgggttcgcttcgagtggaagccggcctccagcctgcgtcgctggctggccgtgtgcggcatcatcctggtgttcctgttggcagaactgaacacgttctacctgaagtttgtgctgtggatgcccccggagcactacctggtcctcctgcggctcgtcttcttcgtgaacgtgggtggcgtggccatgcgtgagatctacgacttcatggatgacccgaagccccacaagaagctgggcccgcaggcctggctggtggcggccatcacggccacggagctgctcatcgtggtgaagtacgacccccacacgctcaccctgtccctgcccttctacatctcccagtgctggaccctcggctccgtcctggcgctcacctggaccgtctggcgcttcttcctgcgggacatcacattgaggtacaaggagacccggtggcagaagtggcagaacaaggatgaccagggcagcaccgtcggcaacggggaccagcacccactggggctggacgaagacctgctggggcctggggtggccgagggcgagggagcaccaactccaaactgacctgggccgtggctgcctcgtgagcctcccagagcccaggcctccgtggcctcctcctgtgtgagtcccaccaggagccacgtgcccggccttgccctcaaggttttttgcttttctcctgtgcacctggcgaggctgaaggcgaggggtggaggaggccccagcacagcctcatctccatgtgtacacgtgtgtacgtgtgtatgcgtgtgtgtacgcgtgtgtacgcgcgtgtgtacacatgcgtggccgcctgtggtgtgcacgtgtgctctgggctccgaggcttctccagagctgggagctggctggcgtggcaagggcatgctctggggcagtgtgtccctcaggaaccagggtcctccctcccctttctgcctggtcagccccgtggcctctggcccaccaagctccctgtcacccagccatggtgtggtccaggcagggacatctcggtaccctttctgcactccgtgggccctgggtgcgctgaggcctggaggcgtctacactggctccacatccacttcccccgcagctcgtgtgggcgctcgtccacaaacactccgtggctgagaggcagcggatccaggcagcgatgctgagccacctcctccgagccttcctttcacacagaccaccccggaggacacgtggatgatggggtcagagatcactgagctgcccctcaagggggcctggaacccgggtgctggggtcatgctgcctccgtggctccaaggtgagggtcatcttcacgagcaaagagaaccaataaagtgacaacgaacgtctgaggcttccaaaaaaaaaaaaaaaaaaaaaaaaaaaaa

SEQ ID NO: 1839 - DNA, 1458 bp, Homo sapiens
ggaagagggagggaggaagcggcttgccggagagccagggcgcagtgggcggcagggctgagcggccggtgatggggaccccacatcccaggcagtgccggcacccctggcgcctgacatgagcccttgcgggcccctcaacctgagcctggcgggcgaggcgaccacatgcgcggcgccctgggtccccaacacgtcggccgtgccgccgtcgggcgcttcgcccgcgctgcccatcttctccatgacgctgggcgccgtgtccaacctgctggcgctggcgctgctggcgcaggccgcgggccgcctgcgacgccgccgctcggccgccaccttcctgctgttcgtggccagcctgctggccaccgacctggcgggccacgtgatcccgggcgcgctggtgctgcgtctgtacactgcggggcgcgctccggccggcggggcctgccacttcctgggcggctgcatggtcttcttcggcctgtgcccgctgctgctgggctgtggcatggccgtggagcgctgcgtgggcgtcacgcggccgctgctccacgccgcgcgggtctcggtcgcccgcgcgcgcctggcgctggccgcggtggccgcggtggccttggccgtggcgctgctgccgctggcgcgcgtgggccgctatgagctgcagtacccgggcacgtggtgcttcatcggcctgggtcccccgggcggctggcgccaggcactgcttgctggcctcttcgccagcctcggcctggtcgcgctcctcgccgcgctggtgtgcaacacgctcagcggcctggccctgctacgcgcccgctggcgacgccgctcccgacggcctcccccggcctcaggccccgacagccggcgtcgctggggggcgcacggaccccgctcggcctccgcctcgtccgcctcgtccatcgcttcggcctccaccttctttggcggctctcggagcagcggctcggcacgcagagctcgcgcccacgacgtggagatggtgggccagcttgtcggtatcatggtggtgtcgtgcatctgctggagcccaatgctggtgttggtggcgctggccgtcggcggctggagctctacctccctgcagcggccactgttcctggccgtgcgccttgcctcctggaaccagatcctggacccttgggtgtacatcctactgcgccaggccgtgctgcgccaactgcttcgcctcttgcccccgagggccggagccaagggcggccccgcggggctgggcctaacaccgagcgcctgggaggccagctcgctgcgcagctcccggcacagcggcctcagccacttctaagcacaaccagaggcccaacgactaagccagcccaccctgggctgggcccaggtgcgcggcgcagagcctttgggaataaaaagccattctgcgaaaaaaaaaaaaaaaaaaaaaaaaaaaaaaaaaaaaaa

SEQ ID NO: 1840 - DNA, 1805 bp, Homo sapiens
gctgctcctctgtcgagctgatcacacccacagttgagctgcgctggccagagatgcctgcccacagcctggtgatgagcagcccggccctcccggccttcctgctctgcagcacgctgctggtcatcaagatgtacgtggtggccatcatcacgggccaagtgaggctgcggaagaaggcctttgccaaccccgaggatgccctgagacacggaggcccccagtattgcaggagcgaccccgacgtggaacgctgcctcagggcccaccggaacgacatggagaccatctaccccttccttttcctgggcttcgtctactcctttctgggtcctaacccttttgtcgcctggatgcacttcctggtcttcctcgtgggccgtgtggcacacaccgtggcctacctggggaagctgcgggcacccatccgctccgtgacctacaccctggcccagctcccctgcgcctccatggctctgcagatcctctgggaagcggcccgccacctgtgaccagcagctgatgcctccttggccaccagaccatgggccaagagccgccgtggctatacctggggacttgatgttccttccagattgtggtgggccctgagtcctggtttcctggcagcctgctgcgcgtgtgggtctctgggcacagtgggcctgtgtgtgtgcccgtgtgtgtgtatgtgtgtgtgtatgtttcttagccccttggattcctgcacgaagtggctgatgggaaccatttcaagacagattgtgaagattgatagaaaatccttcagctaaagtaacagagcatcaaaaacatcactccctctccctccctaacagtgaaaagagagaagggagactctatttaagattcccaaacctaatgatcatctgaatcccgggctaagaatgcagacttttcagactgaccccagaaattctggcccagccaatctagaggcaagcctggccatctgtatttttttttttccaagacagagtcttgctctgttgcccaagctggagtgaagtggtacaatctggctcactgcagcctccgcctcccgggttcaagcgattctcccgcctcagcctcctgagtagctgggattacaggcgcgtatcaccatacccagctaatttttgtatttttagtagagacgggttcaccatgttgcccaggagggtctcgaactcctggcctcaagtgatccaccggcctcggcctcccaaagtgctgggatgacaggcatgaatcactgtgctcagccaccatctggagttttaaaaggctcccatgtgagtccctgtgatggccaggccaggggacccctgccagttctctgtggaagcaaggctggggtcttgggttcctgtatggtggaagctgggtgagccaaggacagggctggctcctctgcccccgctgacgcttcccttgccgttggctttggatgtctttgctgcagtcttctctctggctcaggtgtgggtgggaggggcccacaggaagctcagccttctcctcccaaggtttgagtccctccaaagggcagtgggtggaggaccgggagctttgggtgaccagccactcaaaggaactttctggtcccttcagtatcttcaaggtttggaaactgcaaatgtccccttgatggggaatccgtgtgtgtgtgtgtgtgtgtgtgtgtgtgtgtgtgtgtgtgtgttttctcctagacccgtgacctgagatgtgtgatttttagtcattaaatggaagtgtctgccagctgggcccagcacctaaaaaaaaaaaaaaaaaaa

SEQ ID NO: 1841 - DNA, 4249 bp, Homo sapiens
gcggcgcgcggggactcggaggtactgggcgcgcgcggctccggctcgggacgcctcgggacgcctcggggtcgggctccggctgcggctgctgctgcggcgcccgcgctccggtgcgctccgcctcctgtgcccgccgcggagcgcagtctgcgcgcccgccgtgcgccctcagctccttttcctgagcccgccgcgatgggagctgcgcggggatccccggccagaccccgccggttgcctctgctcagcgtcctgctgctgccgctgctgggcggtacccagacagccattgtcttcatcaagcagccgtcctcccaggatgcactgcaggggcgccgggcgctgcttcgctgtgaggttgaggctccgggcccggtacatgtgtactggctgctcgatggggcccctgtccaggacacggagcggcgtttcgcccagggcagcagcctgagctttgcagctgtggaccggctgcaggactctggcaccttccagtgtgtggctcgggatgatgtcactggagaagaagcccgcagtgccaacgcctccttcaacatcaaatggattgaggcaggtcctgtggtcctgaagcatccagcctcggaagctgagatccagccacagacccaggtcacacttcgttgccacattgatgggcaccctcggcccacctaccaatggttccgagatgggacccccctttctgatggtcagagcaaccacacagtcagcagcaaggagcggaacctgacgctccggccagctggtcctgagcatagtgggctgtattcctgctgcgcccacagtgcttttggccaggcttgcagcagccagaacttcaccttgagcattgctgatgaaagctttgccagggtggtgctggcaccccaggacgtggtagtagcgaggtatgaggaggccatgttccattgccagttctcagcccagccacccccgagcctgcagtggctctttgaggatgagactcccatcactaaccgcagtcgccccccacacctccgcagagccacagtgtttgccaacgggtctctgctgctgacccaggtccggccacgcaatgcagggatctaccgctgcattggccaggggcagaggggcccacccatcatcctggaagccacacttcacctagcagagattgaagacatgccgctatttgagccacgggtgtttacagctggcagcgaggagcgtgtgacctgccttccccccaagggtctgccagagcccagcgtgtggtgggagcacgcgggagtccggctgcccacccatggcagggtctaccagaagggccacgagctggtgttggccaatattgctgaaagtgatgctggtgtctacacctgccacgcggccaacctggctggtcagcggagacaggatgtcaacatcactgtggccactgtgccctcctggctgaagaagccccaagacagccagctggaggagggcaaacccggctacttggattgcctgacccaggccacaccaaaacctacagttgtctggtacagaaaccagatgctcatctcagaggactcacggttcgaggtcttcaagaatgggaccttgcgcatcaacagcgtggaggtgtatgatgggacatggtaccgttgtatgagcagcaccccagccggcagcatcgaggcgcaagcccgtgtccaagtgctggaaaagctcaagttcacaccaccaccccagccacagcagtgcatggagtttgacaaggaggccacggtgccctgttcagccacaggccgagagaagcccactattaagtgggaacgggcagatgggagcagcctcccagagtgggtgacagacaacgctgggaccctgcattttgcccgggtgactcgagatgacgctggcaactacacttgcattgcctccaacgggccgcagggccagattcgtgcccatgtccagctcactgtggcagtttttatcaccttcaaagtggaaccagagcgtacgactgtgtaccagggccacacagccctactgcagtgcgaggcccagggggaccccaagccgctgattcagtggaaaggcaaggaccgcatcctggaccccaccaagctgggacccaggatgcacatcttccagaatggctccctggtgatccatgacgtggcccctgaggactcaggccgctacacctgcattgcaggcaacagctgcaacatcaagcacacggaggcccccctctatgtcgtggacaagcctgtgccggaggagtcggagggccctggcagccctcccccctacaagatgatccagaccattgggttgtcggtgggtgccgctgtggcctacatcattgccgtgctgggcctcatgttctactgcaagaagcgctgcaaagccaagcggctgcagaagcagcccgagggcgaggagccagagatggaatgcctcaacggtgggcctttgcagaacgggcagccctcagcagagatccaagaagaagtggccttgaccagcttgggctccggccccgcggccaccaacaaacgccacagcacaagtgataagatgcacttcccacggtctagcctgcagcccatcaccacgctggggaagagtgagtttggggaggtgttcctggcaaaggctcagggcttggaggagggagtggcagagaccctggtacttgtgaagagcctgcagagcaaggatgagcagcagcagctggacttccggagggagttggagatgtttgggaagctgaaccacgccaacgtggtgcggctcctggggctgtgccgggaggctgagccccactacatggtgctggaatatgtggatctgggagacctcaagcagttcctgaggatttccaagagcaaggatgaaaaattgaagtcacagcccctcagcaccaagcagaaggtggccctatgcacccaggtagccctgggcatggagcacctgtccaacaaccgctttgtgcataaggacttggctgcgcgtaactgcctggtcagtgcccagagacaagtgaaggtgtctgccctgggcctcagcaaggatgtgtacaacagtgagtactaccacttccgccaggcctgggtgccgctgcgctggatgtcccccgaggccatcctggagggtgacttctctaccaagtctgatgtctgggccttcggtgtgctgatgtgggaagtgtttacacatggagagatgccccatggtgggcaggcagatgatgaagtactggcagatttgcaggctgggaaggctagacttcctcagcccgagggctgcccttccaaactctatcggctgatgcagcgctgctgggccctcagccccaaggaccggccctccttcagtgagattgccagcgccctgggagacagcaccgtggacagcaagccgtgaggagggagcccgctcaggatggcctgggcaggggaggacatctctagagggaagctcacagcatgatgggcaagatccctgtcctcctgggccctgaggcccctgccctagtgcaacaggcattgctgaggtctgagcagggcctggcctttcctcctcttcctcaccctcatcctttgggaggctgacttggacccaaactgggcgactagggctttgagctgggcagttttccctgccacctcttcctctatcagggacagtgtgggtgccacaggtaaccccaatttctggccttcaacttctccccttgaccgggtccaactctgccactcatctgccaactttgcctggggagggctaggcttgggatgagctgggtttgtggggagttccttaatattctcaagttctgggcacacagggttaatgagtctcttggcccactggtcccacttgggggtctagaccaggattatagaggacacagcaagtgagtcctccccactctgggcttgtgcacactgacccagacccacgtcttccccacccttctctcctttcctcatcctaagtgcctggcagatgaaggagttttcaggagcttttgacactatataaaccgccctttttgtatgcaccacgggcggcttttatatgtaattgcagcgtggggtgggtgggcatgggaggtaggggtgggccctggagatgaggagggtgggccatccttaccccacacttttattgttgtcgttttttgtttgttttgtttttttgtttttgtttttgtttttacactcgctgctctcaataaataagccttttttacaacctg

SEQ ID NO: 1842 - DNA, 4398 bp, Homo sapiens
agtgaaagttcctcactgagtgagtggggctgactcttcctgcctccggctcttgcctcccagtgccatgcaggtgcaggatgcaaccaggcggccctcagccgtgcgcttcctcagctcctttctccagggccgccggcactccacctcagacccagtactgcggctgcagcaggcccggcggggctctggcttgggctccggctctgccacgaagctgctgtcctcgtcctctctccaggtgatggtggctgtttcctcagtcagccatgcagagggaaacccaactttccccgaaagaaaaagaaatttagaacgtccaacaccaaagtacacaaaagtaggggagcgtttacggcatgtcattcctggacacatggcatgttccatggcgtgtggcggtagagcttgcaagtatgagaacccagcccgctggagtgagcaggagcaagccattaagggggtttactcatcctgggtcactgataatatactggccatggcccgcccatcctctgagctcctggagaagtaccacatcattgatcagttcctcagccatggcataaaaacaataatcaacctccagcgccctggtgagcatgctagctgtgggaaccctctggaacaagaaagtggcttcacataccttcctgaggctttcatggaggctggcatttacttctacaatttcggatggaaggattatggtgtagcgtctcttactactatcctagatatggtgaaggtgatgacatttgccttacaggaaggaaaagtagctatccattgtcatgcagggcttggtcgaacaggtgttttaatagcctgttacttagtttttgcaacgagaatgactgctgaccaagcaattatatttgtgcgggcaaagcgacccaattccatacaaaccagaggacagctcctctgtgtaagggaatttactcagtttctaactcctctccgcaatatattctcttgctgtgatcccaaagcacatgctgtcaccttacctcaatatctaattcgccagcgtcatctgcttcatggttatgaggcacgacttctgaaacacgtgccaaaaattatccacctagtttgcaaattgctgctggacttagcggagaacaggccagtgatgatgaaggatgtgtccgaaggacctggtctctctgctgaaatagaaaagacaatgtctgagatggtcaccatgcagctggataaagagttactgaggcatgacagtgatgtgtccaacccgcctaaccccactgcagtggcagcagattttgacaatcgaggcatgattttctccaatgagcaacagtttgaccctctttggaaaaggcggaatgttgagtgccttcaacccctgactcatctgaaaaggcggctcagctacagtgactcagatttaaagagggccgagaacctcctggagcaaggggagactccacagacagtgcctgcccagatcttggttggccacaagcccaggcagcagaagctcataagccattgttacatcccacagtctccagaaccagacttacacaaggaagccttggttcgcagcacactttctttctggagtcagtcaaagtttggaggcctggaaggactcaaagataatgggtcaccaattttccatggaaggatcattccaaaggaagcacagcagagtggagctttctctgcagatgtttcaggctcacacagccctggggagccagtttcacccagctttgcaaatgtccataaggatccaaaccctgctcaccagcaagtgtctcactgtcagtgtaaaactcatggtgttgggagccctggctctgtcaggcagaacagcaggacaccccgaagccctctggactgtggctccagtcccaaagcacagttcttggttgaacatgaaacccaggacagtaaagatctgtctgaagcagcttcacactctgcattacagtctgaattgagtgctgaggcaagaagaatactggcggccaaagccctagcaaatttaaatgaatctgtagaaaaggaggaactaaaaaggaaggtagaaatgtggcagaaagagcttaattcccgagatggagcttgggaaagaatatgtggcgagagggaccctttcatcctatgcagcttgatgtggtcttgggtggagcaactgaaggagcctgtaatcaccaaagaggatgtggacatgttggttgacaggcgagcagatgccgcagaagcactttttttattagagaagggacagcaccagactattctctgcgtgttgcactgcatagtgaacctgcagacaattcccgtggatgtggaggaagctttccttgcccatgccattaaggcattcactaaggttaattttgattctgaaaatggaccaacagtttacaacaccctgaagaaaatatttaagcacacgctggaagaaaaaagaaaaatgacaaaagatggccctaagcctggcctctagctttcactcgtggtgaatatttcagacctaaagatccagatagtatctctgttcatatgtgaataagttgaagattgtggggctactttttctcatagcactttattttgaatgttgttagtttgtgctgagaatggtcgtccgtatttgaaccaattatttattttaaaatatatttaagctacatttttgttttgaaaaattgccataaatttggtgccactttcttttatttatttgactgagttaatattattgtattaacattttaagtatatggtgtttacattcttatttcttttgacattttggaaataatcataacttgtctttccaaaataaccattttcttgatggaactcttcctagagtttttaccaaatagctaactttagtagtaaaacctcattgtgtatccattcccccacagatgaactaagaaagtcaccaagtgtcttaagctgttttatatttgttacgaagaaggctattgctacaatatttttaaaggtttcttttttaactttgaaattttttgtttttccttttctttttataaatgtaacagagggtttcaaagcatattatttttcagagagatttagttttactttaatggagtgactgtgaagtggttgggattttttgcttgtagaaagtagacttgctctttgtcagatttccaaacaaccttgccagccttggctgtcaaaaggaggcaggagcagttctcaacacaccaagccttattcccactcccttgggttgctgctgagccaaatagcatctttacagaggaagtgggatcagaggcaggaagtgtggaaagttgctaagaagcagggcttgcctctgtcctcccggggactccacagggatattcgtgcagggcaggggctctgtgccagccctgctctctcagatgccacagccactctgcagaggtgactcttggagctggaggaagtcaaaactgggccactgtttgtactgatggtgtattagcatgagcagcgtggccctggccccacactcccaaatctgccactccatagacccacttgcctcaaggctttatatttggctgctttcttacaatgagaattaagatttttaaactgaagttgaccatacaggttgcattagccctaactggcttcatgtaagaagggtgactgcctaaactagttccttgtaagctgaaccatcaattatcagttgaagccatacttttatttaaattaatatacgtagataccagaggccaagccacagagaggataatagttcttcccaataaaggtgatattaatcagactaatttcgaactaaagaagttactgcttaaagacggaatttcaggggaagcaagactcatttagaacaaatgaaatttctccagtcctacatttctgaattgacttctagcacatcaaaaatatttcagtcattatcagtctcattaactgaaatgccaaatgctaaatgcagtgttctttcacactgttttaattttcttgggaaattgagtccagtggatgttaatggagtgggttgcccatccctgaaatgtcttattttcaagtgcctggcctgggaaagaaggggaagaaacaattgcattatatccaaagatacactataaaaatagagtttttaccaaaaaaagatgtttgttctcatctcagtaggcctcatttgggcaagtgacccacaggtcttttggcgagtttgctatttgcctgttgaaatacttgtttcaacttagagaacagttatgatgtgaccatagcatggcacaactaaaaatctaagcctgaaacctgaaaaaagagatatgacaagggaaattaatcaggctatacataagtattgtatttatttgaataaaaataaaaagagcaacccat

SEQ ID NO: 1843 - DNA, 4515 bp, Homo sapiens
gggcgggcgcgctgagggcagcgccggggacgcggcctcagcaggggcgccccgccacggggagcagcccaggcgctcgccccaggacgttgtccggcgggctgggctgggacccctctgcctccagggcgcgtcgggagcagcagggatcggtgccgcgccgtgagggtgcgcagaggctgccctcgggcccgctacccacagaccctccgcggggcagcgtctccgggccggccgcgccctggtccgccgaccgcagacgacttgtgacacggacggcgcgtcctgctgaccccagccggcgccgagggcttggaatctcgagcgggaaaagactaccatggctgcaggagtcttgcctcagaatgaacaaccatattctaccttggtgaataacagcgagtgtgttgcaaacatgaaaggaaatttagaacgtccaacaccaaagtacacaaaagtaggggagcgtttacggcatgtcattcctggacacatggcatgttccatggcgtgtggcggtagagcttgcaagtatgagaacccagcccgctggagtgagcaggagcaagccattaagggggtttactcatcctgggtcactgataatatactggccatggcccgcccatcctctgagctcctggagaagtaccacatcattgatcagttcctcagccatggcataaaaacaataatcaacctccagcgccctggtgagcatgctagctgtgggaaccctctggaacaagaaagtggcttcacataccttcctgaggctttcatggaggctggcatttacttctacaatttcggatggaaggattatggtgtagcgtctcttactactatcctagatatggtgaaggtgatgacatttgccttacaggaaggaaaagtagctatccattgtcatgcagggcttggtcgaacaggtgttttaatagcctgttacttagtttttgcaacgagaatgactgctgaccaagcaattatatttgtgcgggcaaagcgacccaattccatacaaaccagaggacagctcctctgtgtaagggaatttactcagtttctaactcctctccgcaatatattctcttgctgtgatcccaaagcacatgctgtcaccttacctcaatatctaattcgccagcgtcatctgcttcatggttatgaggcacgacttctgaaacacgtgccaaaaattatccacctagtttgcaaattgctgctggacttagcggagaacaggccagtgatgatgaaggatgtgtccgaaggacctggtctctctgctgaaatagaaaagacaatgtctgagatggtcaccatgcagctggataaagagttactgaggcatgacagtgatgtgtccaacccgcctaaccccactgcagtggcagcagattttgacaatcgaggcatgattttctccaatgagcaacagtttgaccctctttggaaaaggcggaatgttgagtgccttcaacccctgactcatctgaaaaggcggctcagctacagtgactcagatttaaagagggccgagaacctcctggagcaaggggagactccacagacagtgcctgcccagatcttggttggccacaagcccaggcagcagaagctcataagccattgttacatcccacagtctccagaaccagacttacacaaggaagccttggttcgcagcacactttctttctggagtcagtcaaagtttggaggcctggaaggactcaaagataatgggtcaccaattttccatggaaggatcattccaaaggaagcacagcagagtggagctttctctgcagatgtttcaggctcacacagccctggggagccagtttcacccagctttgcaaatgtccataaggatccaaaccctgctcaccagcaagtgtctcactgtcagtgtaaaactcatggtgttgggagccctggctctgtcaggcagaacagcaggacaccccgaagccctctggactgtggctccagtcccaaagcacagttcttggttgaacatgaaacccaggacagtaaagatctgtctgaagcagcttcacactctgcattacagtctgaattgagtgctgaggcaagaagaatactggcggccaaagccctagcaaatttaaatgaatctgtagaaaaggaggaactaaaaaggaaggtagaaatgtggcagaaagagcttaattcccgagatggagcttgggaaagaatatgtggcgagagggaccctttcatcctatgcagcttgatgtggtcttgggtggagcaactgaaggagcctgtaatcaccaaagaggatgtggacatgttggttgacaggcgagcagatgccgcagaagcactttttttattagagaagggacagcaccagactattctctgcgtgttgcactgcatagtgaacctgcagacaattcccgtggatgtggaggaagctttccttgcccatgccattaaggcattcactaaggttaattttgattctgaaaatggaccaacagtttacaacaccctgaagaaaatatttaagcacacgctggaagaaaaaagaaaaatgacaaaagatggccctaagcctggcctctagctttcactcgtggtgaatatttcagacctaaagatccagatagtatctctgttcatatgtgaataagttgaagattgtggggctactttttctcatagcactttattttgaatgttgttagtttgtgctgagaatggtcgtccgtatttgaaccaattatttattttaaaatatatttaagctacatttttgttttgaaaaattgccataaatttggtgccactttcttttatttatttgactgagttaatattattgtattaacattttaagtatatggtgtttacattcttatttcttttgacattttggaaataatcataacttgtctttccaaaataaccattttcttgatggaactcttcctagagtttttaccaaatagctaactttagtagtaaaacctcattgtgtatccattcccccacagatgaactaagaaagtcaccaagtgtcttaagctgttttatatttgttacgaagaaggctattgctacaatatttttaaaggtttcttttttaactttgaaattttttgtttttccttttctttttataaatgtaacagagggtttcaaagcatattatttttcagagagatttagttttactttaatggagtgactgtgaagtggttgggattttttgcttgtagaaagtagacttgctctttgtcagatttccaaacaaccttgccagccttggctgtcaaaaggaggcaggagcagttctcaacacaccaagccttattcccactcccttgggttgctgctgagccaaatagcatctttacagaggaagtgggatcagaggcaggaagtgtggaaagttgctaagaagcagggcttgcctctgtcctcccggggactccacagggatattcgtgcagggcaggggctctgtgccagccctgctctctcagatgccacagccactctgcagaggtgactcttggagctggaggaagtcaaaactgggccactgtttgtactgatggtgtattagcatgagcagcgtggccctggccccacactcccaaatctgccactccatagacccacttgcctcaaggctttatatttggctgctttcttacaatgagaattaagatttttaaactgaagttgaccatacaggttgcattagccctaactggcttcatgtaagaagggtgactgcctaaactagttccttgtaagctgaaccatcaattatcagttgaagccatacttttatttaaattaatatacgtagataccagaggccaagccacagagaggataatagttcttcccaataaaggtgatattaatcagactaatttcgaactaaagaagttactgcttaaagacggaatttcaggggaagcaagactcatttagaacaaatgaaatttctccagtcctacatttctgaattgacttctagcacatcaaaaatatttcagtcattatcagtctcattaactgaaatgccaaatgctaaatgcagtgttctttcacactgttttaattttcttgggaaattgagtccagtggatgttaatggagtgggttgcccatccctgaaatgtcttattttcaagtgcctggcctgggaaagaaggggaagaaacaattgcattatatccaaagatacactataaaaatagagtttttaccaaaaaaagatgtttgttctcatctcagtaggcctcatttgggcaagtgacccacaggtcttttggcgagtttgctatttgcctgttgaaatacttgtttcaacttagagaacagttatgatgtgaccatagcatggcacaactaaaaatctaagcctgaaacctgaaaaaagagatatgacaagggaaattaatcaggctatacataagtattgtatttatttgaataaaaataaaaagagcaacccat

SEQ ID NO: 1844 - DNA, 8119 bp, Homo sapiens
cgtccctgcagccctcgcccggcgctccagtagcaggacccggtctcgggaccagccggtaatatgcacgtgtcactagctgaggccctggaggttcggggtggaccacttcaggaggaagaaatatgggctgtattaaatcaaagtgctgaaagtctccaagaattattcagaaaagtaagcctagctgatcctgctgcccttggcttcatcatttctccatggtctctgctgttgctgccatctggtagtgtgtcatttacagatgaaaatatttccaatcaggatcttcgagcattcactgcaccagaggttcttcaaaatcagtcactaacttctctctcagatgttgaaaagatccacatttattctcttggaatgacactgtattggggggctgattatgaagtgcctcagagccaacctattaagcttggagatcatctcaacagcatactgcttggaatgtgtgaggatgttatttacgctcgagtttctgttcggactgtgctggatgcttgcagtgcccacattaggaatagcaattgtgcaccctcattttcctacgtgaaacacttggtaaaactggttctgggaaatctttctgggacagatcagctttcctgtaacagtgaacaaaagcctgatcgaagccaggctattcgagatcgattgcgaggaaaaggattaccaacaggaagaagctctacttctgatgtactagacatacaaaagcctccactctctcatcagacctttcttaacaaagggcttagtaaatctatgggatttctgtccatcaaagatacacaagatgagaattatttcaaggacattttatcagataattctggacgtgaagattctgaaaatacattctccccttaccagttcaaaactagtggcccagaaaaaaaacccatccctggcattgatgtgctttctaagaagaagatctgggcttcatccatggacttgctttgtacagctgacagagacttctcttcaggagagactgccacatatcgtcgttgtcaccctgaggcagtaacagtgcggacttcaactactcctagaaaaaaggaggcaagatactcagatggaagtatagccttggatatctttggccctcagaaaatggatccaatatatcacactcgagaattgcccacctcctcagcaatatcaagtgctttggaccgaatccgagagagacaaaagaaacttcaggttctgagggaagccatgaatgtagaagaaccagttcgaagatacaaaacttatcatggtgatgtctttagtacctccagtgaaagtccatctattatttcctctgaatcagatttcagacaagtgagaagaagtgaagcctcaaagaggtttgaatccagcagtggtctcccaggggtagatgaaaccttaagtcaaggccagtcacagagaccgagcagacaatatgaaacaccctttgaaggcaacttaattaatcaagagatcatgctaaaacggcaagaggaagaactgatgcagctacaagccaaaatggcccttagacagtctcggttgagcctatatccaggagacacaatcaaagcgtccatgcttgacatcaccagggatccgttaagagaaattgccctagaaacagccatgactcaaagaaaactgaggaatttctttggccctgagtttgtgaaaatgacaattgaaccatttatatctttggatttgccacggtctattcttactaagaaagggaagaatgaggataaccgaaggaaagtaaacataatgcttctgaacgggcaaagactggaactgacctgtgataccaaaactatatgtaaagatgtgtttgatatggttgtggcacatattggcttagtagagcatcatttgtttgctttagctaccctcaaagataatgaatatttctttgttgatcctgacttaaaattaaccaaagtggccccagagggatggaaagaagaaccaaagaaaaagaccaaagccactgttaattttactttgtttttcagaattaaattttttatggatgatgttagtctaatacaacatactctgacgtgtcatcagtattaccttcagcttcgaaaagatattttggaggaaaggatgcactgtgatgatgagacttccttattgctggcatccttggctctccaggctgagtatggagattatcaaccagaggttcatggtgtgtcttactttagaatggagcactatttgcccgccagagtgatggagaaacttgatttatcctatatcaaagaagagttacccaaattgcataatacctatgtgggagcttctgaaaaagagacagagttagaatttttaaaggtctgccaaagactgacagaatatggagttcattttcaccgagtgcaccctgagaagaagtcacaaacaggaatattgcttggagtctgttctaaaggtgtccttgtgtttgaagttcacaatggagtgcgcacattggtccttcgctttccatggagggaaaccaagaaaatatctttttctaaaaagaaaatcacattgcaaaatacatcagatggaataaaacatggcttccagacagacaacagtaagatatgccagtacctgctgcacctctgctcttaccagcataagttccagctacagatgagagcaagacagagcaaccaagatgcccaagatattgagagagcttcgtttaggagcctgaatctccaagcagagtctgttagaggatttaatatgggacgagcaatcagcactggcagtctggccagcagcaccctcaacaaacttgctgttcgacctttatcagttcaagctgagattctgaagaggctatcctgctcagagctgtcgctttaccagccattgcaaaacagttcaaaagagaagaatgacaaagcttcatgggaggaaaagcctagagagatgagtaaatcataccatgatctcagtcaggcctctctctatccacatcggaaaaatgtcattgttaacatggaacccccaccacaaaccgttgcagagttggtgggaaaaccttctcaccagatgtcaagatctgatgcagaatctttggcaggagtgacaaaacttaataattcaaagtctgttgcgagtttaaatagaagtcctgaaaggaggaaacatgaatcagactcctcatccattgaagaccctgggcaagcatatgttctaggaatgactatgcatagttctggaaactcttcatcccaagtacccttaaaagaaaatgatgtgctacacaaaagatggagcatagtatcttcaccagaaagggagatcaccttagtgaacctgaaaaaagatgcaaagtatggcttgggatttcaaattattggtggggagaagatgggaagactggacctaggcatatttatcagttcagttgcccctggaggaccagctgacttggatggatgcttgaagccaggagaccgtttgatatctgtgaatagtgtgagtctggagggagtcagccaccatgctgcaattgaaattttgcaaaatgcacctgaagatgtgacacttgttatctctcagccaaaagaaaagatatccaaagtgccttctactcctgtgcatctcaccaatgagatgaaaaactacatgaagaaatcttcctacatgcaagacagtgctatagattcttcttccaaggatcaccactggtcacgtggtaccctgaggcacatctcggagaactcctttgggccatctgggggcctgcgggaaggaagcctgagttctcaagattccaggactgagagtgccagcttgtctcaaagccaggtcaatggtttctttgccagccatttaggtgaccaaacctggcaggaatcacagcatggcagcccttccccatctgtaatatccaaagccaccgagaaagagactttcactgatagtaaccaaagcaaaactaaaaagccaggcatttctgatgtaactgattactcagaccgtggagattcagacatggatgaagccacttactccagcagtcaggatcatcaaacaccaaaacaggaatcttcctcttcagtgaatacatccaacaagatgaattttaaaactttttcttcatcacctcctaagcctggagatatctttgaggttgaactggctaaaaatgataacagcttggggataagtgtcacgggaggtgtgaatacgagtgtcagacatggtggcatttatgtgaaagctgttattccccagggagcagcagagtctgatggtagaattcacaaaggtgatcgcgtcctagctgtcaatggagttagtctagaaggagccacccataagcaagctgtggaaacactgagaaatacaggacaggtggttcatctgttattagaaaagggacaatctccaacatctaaagaacatgtcccggtaaccccacagtgtaccctttcagatcagaatgcccaaggtcaaggcccagaaaaagtgaagaaaacaactcaggtcaaagactacagctttgtcactgaagaaaatacatttgaggtaaaattatttaaaaatagctcaggtctaggattcagtttttctcgagaagataatcttataccggagcaaattaatgccagcatagtaagggttaaaaagctctttcctggacagccagcagcagaaagtggaaaaattgatgtaggagatgttatcttgaaagtgaatggagcctctttgaaaggactatctcagcaggaagtcatatctgctctcaggggaactgctccagaagtattcttgcttctctgcagacctccacctggtgtgctaccggaaattgatactgcgcttttgaccccacttcagtctccagcacaagtacttccaaacagcagtaaagactcttctcagccatcatgtgtggagcaaagcaccagctcagatgaaaatgaaatgtcagacaaaagcaaaaaacagtgcaagtccccatccagaagagacagttacagtgacagcagtgggagtggagaagatgacttagtgacagctccagcaaacatatcaaattcgacctggagttcagctttgcatcagactctaagcaacatggtatcacaggcacagagtcatcatgaagcacccaagagtcaagaagataccatttgtaccatgttttactatcctcagaaaattcccaataaaccagagtttgaggacagtaatccttcccctctaccaccggatatggctcctgggcagagttatcaaccccaatcagaatctgcttcctctagttcgatggataagtatcatatacatcacatttctgaaccaactagacaagaaaactggacacctttgaaaaatgacttggaaaatcaccttgaagactttgaactggaagtagaactcctcattaccctaattaaatcagaaaaaggaagcctgggttttacagtaaccaaaggcaatcagagaattggttgttatgttcatgatgtcatacaggatccagccaaaagtgatggaaggctaaaacctggggaccggctcataaaggttaatgatacagatgttactaatatgactcatacagatgcagttaatctgctccgggctgcatccaaaacagtcagattagttattggacgagttctagaattacccagaataccaatgttgcctcatttgctaccggacataacactaacgtgcaacaaagaggagttgggtttttccttatgtggaggtcatgacagcctttatcaagtggtatatattagtgatattaatccaaggtccgtcgcagccattgagggtaatctccagctattagatgtcatccattatgtgaacggagtcagcacacaaggaatgaccttggaggaagttaacagagcattagacatgtcacttccttcattggtattgaaagcaacaagaaatgatcttccagtggtccccagctcaaagaggtctgctgtttcagctccaaagtcaaccaaaggcaatggttcctacagtgtggggtcttgcagccagcctgccctcactcctaatgattcattctccacggttgctggggaagaaataaatgaaatatcgtaccccaaaggaaaatgttctacttatcagataaagggatcaccaaacttgactctgcccaaagaatcttatatacaagaagatgacatttatgatgattcccaagaagctgaagttatccagtctctgctggatgttgtggatgaggaagcccagaatcttttaaacgaaaataatgcagcaggatactcctgtggtccaggtacattaaagatgaatgggaagttatcagaagagagaacagaagatacagactgcgatggttcacctttacctgagtattttactgaggccaccaaaatgaatggctgtgaagaatattgtgaagaaaaagtaaaaagtgaaagcttaattcagaagccacaagaaaagaagactgatgatgatgaaataacatggggaaatgatgagttgccaatagagagaacaaaccatgaagattctgataaagatcattcctttctgacaaacgatgagctcgctgtactccctgtcgtcaaagtgcttccctctggtaaatacacgggtgccaacttaaaatcagtcattcgagtcctgcggggtttgctagatcaaggaattccttctaaggagctggagaatcttcaagaattaaaacctttggatcagtgtctaattgggcaaactaaggaaaacagaaggaagaacagatataaaaatatacttccctatgatgctacaagagtgcctcttggagatgaaggtggctatatcaatgccagcttcattaagataccagttgggaaagaagagttcgtttacattgcctgccaaggaccactgcctacaactgttggagacttctggcagatgatttgggagcaaaaatccacagtgatagccatgatgactcaagaagtagaaggagaaaaaatcaaatgccagcgctattggcccaacatcctaggcaaaacaacaatggtcagcaacagacttcgactggctcttgtgagaatgcagcagctgaagggctttgtggtgagggcaatgacccttgaagatattcagaccagagaggtgcgccatatttctcatctgaatttcactgcctggccagaccatgatacaccttctcaaccagatgatctgcttacttttatctcctacatgagacacatccacagatcaggcccaatcattacgcactgcagtgctggcattggacgttcagggaccctgatttgcatagatgtggttctgggattaatcagtcaggatcttgattttgacatctctgatttggtgcgctgcatgagactacaaagacacggaatggttcagacagaggatcaatatattttctgctatcaagtcatcctttatgtcctgacacgtcttcaagcagaagaagagcaaaaacagcagcctcagcttctgaagtgacatgaaaagagcctctggatgcatttccatttctctccttaacctccagcagactcctgctctctatccaaaataaagatcacagagcagcaagttcatacaacatgcatgttctcctctatcttagaggggtattcttcttgaaaataaaaaatattgaaatgctgtatttttacagctactttaacctatgataattatttacaaaattttaacactaaccaaacaatgcagatcttagggatgattaaaggcagcatttgatgatagcagacattgttacaaggacatggtgagtctatttttaatgcaccaatcttgtttatagcaaaaatgttttccaatattttaataaagtagttattttataggggatacttgaaaccagtatttaagctttaaatgacagtaatattggcatagaaaaaagtagcaaatgtttactgtatcaatttctaatgtttactatatagaatttcctgtaatatatttatatactttttcatgaaaatggagttatcagttatctgtttgttactgcatcatctgtttgtaatcattatctcactttgtaaataaaaacacaccttaaaacatg

SEQ ID NO: 1845 - DNA, 8062 bp, Homo sapiens
cgtccctgcagccctcgcccggcgctccagtagcaggacccggtctcgggaccagccggtaatatgcacgtgtcactagctgaggccctggaggttcggggtggaccacttcaggaggaagaaatatgggctgtattaaatcaaagtgctgaaagtctccaagaattattcagaaaagtaagcctagctgatcctgctgcccttggcttcatcatttctccatggtctctgctgttgctgccatctggtagtgtgtcatttacagatgaaaatatttccaatcaggatcttcgagcattcactgcaccagaggttcttcaaaatcagtcactaacttctctctcagatgttgaaaagatccacatttattctcttggaatgacactgtattggggggctgattatgaagtgcctcagagccaacctattaagcttggagatcatctcaacagcatactgcttggaatgtgtgaggatgttatttacgctcgagtttctgttcggactgtgctggatgcttgcagtgcccacattaggaatagcaattgtgcaccctcattttcctacgtgaaacacttggtaaaactggttctgggaaatctttctgggacagatcagctttcctgtaacagtgaacaaaagcctgatcgaagccaggctattcgagatcgattgcgaggaaaaggattaccaacaggaagaagctctacttctgatgtactagacatacaaaagcctccactctctcatcagacctttcttaacaaagggcttagtaaatctatgggatttctgtccatcaaagatacacaagatgagaattatttcaaggacattttatcagataattctggacgtgaagattctgaaaatacattctccccttaccagttcaaaactagtggcccagaaaaaaaacccatccctggcattgatgtgctttctaagaagaagatctgggcttcatccatggacttgctttgtacagctgacagagacttctcttcaggagagactgccacatatcgtcgttgtcaccctgaggcagtaacagtgcggacttcaactactcctagaaaaaaggaggcaagatactcagatggaagtatagccttggatatctttggccctcagaaaatggatccaatatatcacactcgagaattgcccacctcctcagcaatatcaagtgctttggaccgaatccgagagagacaaaagaaacttcaggttctgagggaagccatgaatgtagaagaaccagttcgaagatacaaaacttatcatggtgatgtctttagtacctccagtgaaagtccatctattatttcctctgaatcagatttcagacaagtgagaagaagtgaagcctcaaagaggtttgaatccagcagtggtctcccaggggtagatgaaaccttaagtcaaggccagtcacagagaccgagcagacaatatgaaacaccctttgaaggcaacttaattaatcaagagatcatgctaaaacggcaagaggaagaactgatgcagctacaagccaaaatggcccttagacagtctcggttgagcctatatccaggagacacaatcaaagcgtccatgcttgacatcaccagggatccgttaagagaaattgccctagaaacagccatgactcaaagaaaactgaggaatttctttggccctgagtttgtgaaaatgacaattgaaccatttatatctttggatttgccacggtctattcttactaagaaagggaagaatgaggataaccgaaggaaagtaaacataatgcttctgaacgggcaaagactggaactgacctgtgataccaaaactatatgtaaagatgtgtttgatatggttgtggcacatattggcttagtagagcatcatttgtttgctttagctaccctcaaagataatgaatatttctttgttgatcctgacttaaaattaaccaaagtggccccagagggatggaaagaagaaccaaagaaaaagaccaaagccactgttaattttactttgtttttcagaattaaattttttatggatgatgttagtctaatacaacatactctgacgtgtcatcagtattaccttcagcttcgaaaagatattttggaggaaaggatgcactgtgatgatgagacttccttattgctggcatccttggctctccaggctgagtatggagattatcaaccagaggttcatggtgtgtcttactttagaatggagcactatttgcccgccagagtgatggagaaacttgatttatcctatatcaaagaagagttacccaaattgcataatacctatgtgggagcttctgaaaaagagacagagttagaatttttaaaggtctgccaaagactgacagaatatggagttcattttcaccgagtgcaccctgagaagaagtcacaaacaggaatattgcttggagtctgttctaaaggtgtccttgtgtttgaagttcacaatggagtgcgcacattggtccttcgctttccatggagggaaaccaagaaaatatctttttctaaaaagaaaatcacattgcaaaatacatcagatggaataaaacatggcttccagacagacaacagtaagatatgccagtacctgctgcacctctgctcttaccagcataagttccagctacagatgagagcaagacagagcaaccaagatgcccaagatattgagagagcttcgtttaggagcctgaatctccaagcagagtctgttagaggatttaatatgggacgagcaatcagcactggcagtctggccagcagcaccctcaacaaacttgctgttcgacctttatcagttcaagctgagattctgaagaggctatcctgctcagagctgtcgctttaccagccattgcaaaacagttcaaaagagaagaatgacaaagcttcatgggaggaaaagcctagagagatgagtaaatcataccatgatctcagtcaggcctctctctatccacatcggaaaaatgtcattgttaacatggaacccccaccacaaaccgttgcagagttggtgggaaaaccttctcaccagatgtcaagatctgatgcagaatctttggcaggagtgacaaaacttaataattcaaagtctgttgcgagtttaaatagaagtcctgaaaggaggaaacatgaatcagactcctcatccattgaagaccctgggcaagcatatgttctagatgtgctacacaaaagatggagcatagtatcttcaccagaaagggagatcaccttagtgaacctgaaaaaagatgcaaagtatggcttgggatttcaaattattggtggggagaagatgggaagactggacctaggcatatttatcagttcagttgcccctggaggaccagctgacttggatggatgcttgaagccaggagaccgtttgatatctgtgaatagtgtgagtctggagggagtcagccaccatgctgcaattgaaattttgcaaaatgcacctgaagatgtgacacttgttatctctcagccaaaagaaaagatatccaaagtgccttctactcctgtgcatctcaccaatgagatgaaaaactacatgaagaaatcttcctacatgcaagacagtgctatagattcttcttccaaggatcaccactggtcacgtggtaccctgaggcacatctcggagaactcctttgggccatctgggggcctgcgggaaggaagcctgagttctcaagattccaggactgagagtgccagcttgtctcaaagccaggtcaatggtttctttgccagccatttaggtgaccaaacctggcaggaatcacagcatggcagcccttccccatctgtaatatccaaagccaccgagaaagagactttcactgatagtaaccaaagcaaaactaaaaagccaggcatttctgatgtaactgattactcagaccgtggagattcagacatggatgaagccacttactccagcagtcaggatcatcaaacaccaaaacaggaatcttcctcttcagtgaatacatccaacaagatgaattttaaaactttttcttcatcacctcctaagcctggagatatctttgaggttgaactggctaaaaatgataacagcttggggataagtgtcacgggaggtgtgaatacgagtgtcagacatggtggcatttatgtgaaagctgttattccccagggagcagcagagtctgatggtagaattcacaaaggtgatcgcgtcctagctgtcaatggagttagtctagaaggagccacccataagcaagctgtggaaacactgagaaatacaggacaggtggttcatctgttattagaaaagggacaatctccaacatctaaagaacatgtcccggtaaccccacagtgtaccctttcagatcagaatgcccaaggtcaaggcccagaaaaagtgaagaaaacaactcaggtcaaagactacagctttgtcactgaagaaaatacatttgaggtaaaattatttaaaaatagctcaggtctaggattcagtttttctcgagaagataatcttataccggagcaaattaatgccagcatagtaagggttaaaaagctctttcctggacagccagcagcagaaagtggaaaaattgatgtaggagatgttatcttgaaagtgaatggagcctctttgaaaggactatctcagcaggaagtcatatctgctctcaggggaactgctccagaagtattcttgcttctctgcagacctccacctggtgtgctaccggaaattgatactgcgcttttgaccccacttcagtctccagcacaagtacttccaaacagcagtaaagactcttctcagccatcatgtgtggagcaaagcaccagctcagatgaaaatgaaatgtcagacaaaagcaaaaaacagtgcaagtccccatccagaagagacagttacagtgacagcagtgggagtggagaagatgacttagtgacagctccagcaaacatatcaaattcgacctggagttcagctttgcatcagactctaagcaacatggtatcacaggcacagagtcatcatgaagcacccaagagtcaagaagataccatttgtaccatgttttactatcctcagaaaattcccaataaaccagagtttgaggacagtaatccttcccctctaccaccggatatggctcctgggcagagttatcaaccccaatcagaatctgcttcctctagttcgatggataagtatcatatacatcacatttctgaaccaactagacaagaaaactggacacctttgaaaaatgacttggaaaatcaccttgaagactttgaactggaagtagaactcctcattaccctaattaaatcagaaaaaggaagcctgggttttacagtaaccaaaggcaatcagagaattggttgttatgttcatgatgtcatacaggatccagccaaaagtgatggaaggctaaaacctggggaccggctcataaaggttaatgatacagatgttactaatatgactcatacagatgcagttaatctgctccgggctgcatccaaaacagtcagattagttattggacgagttctagaattacccagaataccaatgttgcctcatttgctaccggacataacactaacgtgcaacaaagaggagttgggtttttccttatgtggaggtcatgacagcctttatcaagtggtatatattagtgatattaatccaaggtccgtcgcagccattgagggtaatctccagctattagatgtcatccattatgtgaacggagtcagcacacaaggaatgaccttggaggaagttaacagagcattagacatgtcacttccttcattggtattgaaagcaacaagaaatgatcttccagtggtccccagctcaaagaggtctgctgtttcagctccaaagtcaaccaaaggcaatggttcctacagtgtggggtcttgcagccagcctgccctcactcctaatgattcattctccacggttgctggggaagaaataaatgaaatatcgtaccccaaaggaaaatgttctacttatcagataaagggatcaccaaacttgactctgcccaaagaatcttatatacaagaagatgacatttatgatgattcccaagaagctgaagttatccagtctctgctggatgttgtggatgaggaagcccagaatcttttaaacgaaaataatgcagcaggatactcctgtggtccaggtacattaaagatgaatgggaagttatcagaagagagaacagaagatacagactgcgatggttcacctttacctgagtattttactgaggccaccaaaatgaatggctgtgaagaatattgtgaagaaaaagtaaaaagtgaaagcttaattcagaagccacaagaaaagaagactgatgatgatgaaataacatggggaaatgatgagttgccaatagagagaacaaaccatgaagattctgataaagatcattcctttctgacaaacgatgagctcgctgtactccctgtcgtcaaagtgcttccctctggtaaatacacgggtgccaacttaaaatcagtcattcgagtcctgcggggtttgctagatcaaggaattccttctaaggagctggagaatcttcaagaattaaaacctttggatcagtgtctaattgggcaaactaaggaaaacagaaggaagaacagatataaaaatatacttccctatgatgctacaagagtgcctcttggagatgaaggtggctatatcaatgccagcttcattaagataccagttgggaaagaagagttcgtttacattgcctgccaaggaccactgcctacaactgttggagacttctggcagatgatttgggagcaaaaatccacagtgatagccatgatgactcaagaagtagaaggagaaaaaatcaaatgccagcgctattggcccaacatcctaggcaaaacaacaatggtcagcaacagacttcgactggctcttgtgagaatgcagcagctgaagggctttgtggtgagggcaatgacccttgaagatattcagaccagagaggtgcgccatatttctcatctgaatttcactgcctggccagaccatgatacaccttctcaaccagatgatctgcttacttttatctcctacatgagacacatccacagatcaggcccaatcattacgcactgcagtgctggcattggacgttcagggaccctgatttgcatagatgtggttctgggattaatcagtcaggatcttgattttgacatctctgatttggtgcgctgcatgagactacaaagacacggaatggttcagacagaggatcaatatattttctgctatcaagtcatcctttatgtcctgacacgtcttcaagcagaagaagagcaaaaacagcagcctcagcttctgaagtgacatgaaaagagcctctggatgcatttccatttctctccttaacctccagcagactcctgctctctatccaaaataaagatcacagagcagcaagttcatacaacatgcatgttctcctctatcttagaggggtattcttcttgaaaataaaaaatattgaaatgctgtatttttacagctactttaacctatgataattatttacaaaattttaacactaaccaaacaatgcagatcttagggatgattaaaggcagcatttgatgatagcagacattgttacaaggacatggtgagtctatttttaatgcaccaatcttgtttatagcaaaaatgttttccaatattttaataaagtagttattttataggggatacttgaaaccagtatttaagctttaaatgacagtaatattggcatagaaaaaagtagcaaatgtttactgtatcaatttctaatgtttactatatagaatttcctgtaatatatttatatactttttcatgaaaatggagttatcagttatctgtttgttactgcatcatctgtttgtaatcattatctcactttgtaaataaaaacacaccttaaaacatg

SEQ ID NO: 1846 - DNA, 7546 bp, Homo sapiens
cgtccctgcagccctcgcccggcgctccagtagcaggacccggtctcgggaccagccggtaatatgcacgtgtcactagctgaggccctggaggttcggggtggaccacttcaggaggaagaaatatgggctgtattaaatcaaagtgctgaaagtctccaagaattattcagaaaagtaagcctagctgatcctgctgcccttggcttcatcatttctccatggtctctgctgttgctgccatctggtagtgtgtcatttacagatgaaaatatttccaatcaggatcttcgagcattcactgcaccagaggttcttcaaaatcagtcactaacttctctctcagatgttgaaaagatccacatttattctcttggaatgacactgtattggggggctgattatgaagtgcctcagagccaacctattaagcttggagatcatctcaacagcatactgcttggaatgtgtgaggatgttatttacgctcgagtttctgttcggactgtgctggatgcttgcagtgcccacattaggaatagcaattgtgcaccctcattttcctacgtgaaacacttggtaaaactggttctgggaaatctttctgggacagatcagctttcctgtaacagtgaacaaaagcctgatcgaagccaggctattcgagatcgattgcgaggaaaaggattaccaacaggaagaagctctacttctgatgtactagacatacaaaagcctccactctctcatcagacctttcttaacaaagggcttagtaaatctatgggatttctgtccatcaaagatacacaagatgagaattatttcaaggacattttatcagataattctggacgtgaagattctgaaaatacattctccccttaccagttcaaaactagtggcccagaaaaaaaacccatccctggcattgatgtgctttctaagaagaagatctgggcttcatccatggacttgctttgtacagctgacagagacttctcttcaggagagactgccacatatcgtcgttgtcaccctgaggcagtaacagtgcggacttcaactactcctagaaaaaaggaggcaagatactcagatggaagtatagccttggatatctttggccctcagaaaatggatccaatatatcacactcgagaattgcccacctcctcagcaatatcaagtgctttggaccgaatccgagagagacaaaagaaacttcaggttctgagggaagccatgaatgtagaagaaccagttcgaagatacaaaacttatcatggtgatgtctttagtacctccagtgaaagtccatctattatttcctctgaatcagatttcagacaagtgagaagaagtgaagcctcaaagaggtttgaatccagcagtggtctcccaggggtagatgaaaccttaagtcaaggccagtcacagagaccgagcagacaatatgaaacaccctttgaaggcaacttaattaatcaagagatcatgctaaaacggcaagaggaagaactgatgcagctacaagccaaaatggcccttagacagtctcggttgagcctatatccaggagacacaatcaaagcgtccatgcttgacatcaccagggatccgttaagagaaattgccctagaaacagccatgactcaaagaaaactgaggaatttctttggccctgagtttgtgaaaatgacaattgaaccatttatatctttggatttgccacggtctattcttactaagaaagggaagaatgaggataaccgaaggaaagtaaacataatgcttctgaacgggcaaagactggaactgacctgtgataccaaaactatatgtaaagatgtgtttgatatggttgtggcacatattggcttagtagagcatcatttgtttgctttagctaccctcaaagataatgaatatttctttgttgatcctgacttaaaattaaccaaagtggccccagagggatggaaagaagaaccaaagaaaaagaccaaagccactgttaattttactttgtttttcagaattaaattttttatggatgatgttagtctaatacaacatactctgacgtgtcatcagtattaccttcagcttcgaaaagatattttggaggaaaggatgcactgtgatgatgagacttccttattgctggcatccttggctctccaggctgagtatggagattatcaaccagaggttcatggtgtgtcttactttagaatggagcactatttgcccgccagagtgatggagaaacttgatttatcctatatcaaagaagagttacccaaattgcataatacctatgtgggagcttctgaaaaagagacagagttagaatttttaaaggtctgccaaagactgacagaatatggagttcattttcaccgagtgcaccctgagaagaagtcacaaacaggaatattgcttggagtctgttctaaaggtgtccttgtgtttgaagttcacaatggagtgcgcacattggtccttcgctttccatggagggaaaccaagaaaatatctttttctaaaaagaaaatcacattgcaaaatacatcagatggaataaaacatggcttccagacagacaacagtaagatatgccagtacctgctgcacctctgctcttaccagcataagttccagctacagatgagagcaagacagagcaaccaagatgcccaagatattgatgtgctacacaaaagatggagcatagtatcttcaccagaaagggagatcaccttagtgaacctgaaaaaagatgcaaagtatggcttgggatttcaaattattggtggggagaagatgggaagactggacctaggcatatttatcagttcagttgcccctggaggaccagctgacttggatggatgcttgaagccaggagaccgtttgatatctgtgaatagtgtgagtctggagggagtcagccaccatgctgcaattgaaattttgcaaaatgcacctgaagatgtgacacttgttatctctcagccaaaagaaaagatatccaaagtgccttctactcctgtgcatctcaccaatgagatgaaaaactacatgaagaaatcttcctacatgcaagacagtgctatagattcttcttccaaggatcaccactggtcacgtggtaccctgaggcacatctcggagaactcctttgggccatctgggggcctgcgggaaggaagcctgagttctcaagattccaggactgagagtgccagcttgtctcaaagccaggtcaatggtttctttgccagccatttaggtgaccaaacctggcaggaatcacagcatggcagcccttccccatctgtaatatccaaagccaccgagaaagagactttcactgatagtaaccaaagcaaaactaaaaagccaggcatttctgatgtaactgattactcagaccgtggagattcagacatggatgaagccacttactccagcagtcaggatcatcaaacaccaaaacaggaatcttcctcttcagtgaatacatccaacaagatgaattttaaaactttttcttcatcacctcctaagcctggagatatctttgaggttgaactggctaaaaatgataacagcttggggataagtgtcacgggaggtgtgaatacgagtgtcagacatggtggcatttatgtgaaagctgttattccccagggagcagcagagtctgatggtagaattcacaaaggtgatcgcgtcctagctgtcaatggagttagtctagaaggagccacccataagcaagctgtggaaacactgagaaatacaggacaggtggttcatctgttattagaaaagggacaatctccaacatctaaagaacatgtcccggtaaccccacagtgtaccctttcagatcagaatgcccaaggtcaaggcccagaaaaagtgaagaaaacaactcaggtcaaagactacagctttgtcactgaagaaaatacatttgaggtaaaattatttaaaaatagctcaggtctaggattcagtttttctcgagaagataatcttataccggagcaaattaatgccagcatagtaagggttaaaaagctctttcctggacagccagcagcagaaagtggaaaaattgatgtaggagatgttatcttgaaagtgaatggagcctctttgaaaggactatctcagcaggaagtcatatctgctctcaggggaactgctccagaagtattcttgcttctctgcagacctccacctggtgtgctaccggaaattgatactgcgcttttgaccccacttcagtctccagcacaagtacttccaaacagcagtaaagactcttctcagccatcatgtgtggagcaaagcaccagctcagatgaaaatgaaatgtcagacaaaagcaaaaaacagtgcaagtccccatccagaagagacagttacagtgacagcagtgggagtggagaagatgacttagtgacagctccagcaaacatatcaaattcgacctggagttcagctttgcatcagactctaagcaacatggtatcacaggcacagagtcatcatgaagcacccaagagtcaagaagataccatttgtaccatgttttactatcctcagaaaattcccaataaaccagagtttgaggacagtaatccttcccctctaccaccggatatggctcctgggcagagttatcaaccccaatcagaatctgcttcctctagttcgatggataagtatcatatacatcacatttctgaaccaactagacaagaaaactggacacctttgaaaaatgacttggaaaatcaccttgaagactttgaactggaagtagaactcctcattaccctaattaaatcagaaaaaggaagcctgggttttacagtaaccaaaggcaatcagagaattggttgttatgttcatgatgtcatacaggatccagccaaaagtgatggaaggctaaaacctggggaccggctcataaaggttaatgatacagatgttactaatatgactcatacagatgcagttaatctgctccgggctgcatccaaaacagtcagattagttattggacgagttctagaattacccagaataccaatgttgcctcatttgctaccggacataacactaacgtgcaacaaagaggagttgggtttttccttatgtggaggtcatgacagcctttatcaagtggtatatattagtgatattaatccaaggtccgtcgcagccattgagggtaatctccagctattagatgtcatccattatgtgaacggagtcagcacacaaggaatgaccttggaggaagttaacagagcattagacatgtcacttccttcattggtattgaaagcaacaagaaatgatcttccagtggtccccagctcaaagaggtctgctgtttcagctccaaagtcaaccaaaggcaatggttcctacagtgtggggtcttgcagccagcctgccctcactcctaatgattcattctccacggttgctggggaagaaataaatgaaatatcgtaccccaaaggaaaatgttctacttatcagataaagggatcaccaaacttgactctgcccaaagaatcttatatacaagaagatgacatttatgatgattcccaagaagctgaagttatccagtctctgctggatgttgtggatgaggaagcccagaatcttttaaacgaaaataatgcagcaggatactcctgtggtccaggtacattaaagatgaatgggaagttatcagaagagagaacagaagatacagactgcgatggttcacctttacctgagtattttactgaggccaccaaaatgaatggctgtgaagaatattgtgaagaaaaagtaaaaagtgaaagcttaattcagaagccacaagaaaagaagactgatgatgatgaaataacatggggaaatgatgagttgccaatagagagaacaaaccatgaagattctgataaagatcattcctttctgacaaacgatgagctcgctgtactccctgtcgtcaaagtgcttccctctggtaaatacacgggtgccaacttaaaatcagtcattcgagtcctgcggggtttgctagatcaaggaattccttctaaggagctggagaatcttcaagaattaaaacctttggatcagtgtctaattgggcaaactaaggaaaacagaaggaagaacagatataaaaatatacttccctatgatgctacaagagtgcctcttggagatgaaggtggctatatcaatgccagcttcattaagataccagttgggaaagaagagttcgtttacattgcctgccaaggaccactgcctacaactgttggagacttctggcagatgatttgggagcaaaaatccacagtgatagccatgatgactcaagaagtagaaggagaaaaaatcaaatgccagcgctattggcccaacatcctaggcaaaacaacaatggtcagcaacagacttcgactggctcttgtgagaatgcagcagctgaagggctttgtggtgagggcaatgacccttgaagatattcagaccagagaggtgcgccatatttctcatctgaatttcactgcctggccagaccatgatacaccttctcaaccagatgatctgcttacttttatctcctacatgagacacatccacagatcaggcccaatcattacgcactgcagtgctggcattggacgttcagggaccctgatttgcatagatgtggttctgggattaatcagtcaggatcttgattttgacatctctgatttggtgcgctgcatgagactacaaagacacggaatggttcagacagaggatcaatatattttctgctatcaagtcatcctttatgtcctgacacgtcttcaagcagaagaagagcaaaaacagcagcctcagcttctgaagtgacatgaaaagagcctctggatgcatttccatttctctccttaacctccagcagactcctgctctctatccaaaataaagatcacagagcagcaagttcatacaacatgcatgttctcctctatcttagaggggtattcttcttgaaaataaaaaatattgaaatgctgtatttttacagctactttaacctatgataattatttacaaaattttaacactaaccaaacaatgcagatcttagggatgattaaaggcagcatttgatgatagcagacattgttacaaggacatggtgagtctatttttaatgcaccaatcttgtttatagcaaaaatgttttccaatattttaataaagtagttattttataggggatacttgaaaccagtatttaagctttaaatgacagtaatattggcatagaaaaaagtagcaaatgtttactgtatcaatttctaatgtttactatatagaatttcctgtaatatatttatatactttttcatgaaaatggagttatcagttatctgtttgttactgcatcatctgtttgtaatcattatctcactttgtaaataaaaacacaccttaaaacatg

SEQ ID NO: 1847 - DNA, 5283 bp, Homo sapiens
gacttccggcacgaaggggcggggctgggctcgtggctgagccagcagctgcagcagctacgggagtggccgggtggccggcgggtgccagccgccatggaggccgtgccccgcatgcccatgatctggctggacctgaaggaggccggtgactttcacttccagccagctgtgaagaagtttgtcctgaagaattatggagagaacccagaagcctacaatgaagaactgaagaagctggagttgctcagacagaatgctgtccgtgtcccacgagactttgagggctgtagtgtcctccgcaagtacctcggccagcttcattacctgcagagtcgggtccccatgggctcgggccaggaggccgctgtccctgtcacctggacagagatcttctcaggcaagtctgtggcccatgaggacatcaagtacgagcaggcctgtattctctacaaccttggagcgctgcactccatgctgggggccatggacaagcgggtgtctgaggagggcatgaaggtctcctgtacccatttccagtgcgcagccggcgccttcgcctacctacgggagcacttccctcaagcctacagcgtcgacatgagccgccagatccttacgctcaacgtcaacctcatgctgggccaggctcaggagtgcctcctggagaagtcgatgttggacaacaggaagagctttctggtggcccgcatcagtgcacaggtggtagattactacaaggaggcatgccgggccttggagaaccccgacactgcctcactgctgggccggatccagaaggactggaagaaacttgtgcagatgaagatctactacttcgcagccgtggctcatctgcacatgggaaagcaggccgaggagcagcagaagttcggggagcgggttgcatacttccagagcgccctggacaagctcaatgaagccatcaagttggccaagggccagcctgacactgtgcaagacgcgcttcgcttcactatggatgtcattgggggaaagtacaattctgccaagaaggacaacgacttcatttaccatgaggctgtcccagcattggacactcttcagcctgtaaaaggagcccccttggtgaagcccttgccagtgaaccccacagacccagctgttacaggccctgacatctttgccaaactggtacccatggctgcccacgaggcctcgtcactgtacagtgaggagaaggccaagctgctccgggagatgatggccaagattgaggacaagaatgaggtcctggaccagttcatggattcaatgcagttggatcccgagacggtggacaaccttgatgcctacagccacatcccaccccagctcatggagaagtgcgcggctctcagcgtccggcccgacactgtcaggaaccttgtacagtccatgcaagtgctgtcaggtgtgttcacggatgtggaggcttccctgaaggacatcagagatctgttggaggaggatgagctgctagagcagaagtttcaggaggcggtgggccaggcaggggccatctccatcacctccaaggctgagctggcagaggtgaggcgagaatgggccaagtacatggaagtccatgagaaggcctccttcaccaacagtgagctgcaccgtgccatgaacctgcacgtcggcaacctgcgcctgctcagcgggccgcttgaccaggtccgggctgccctgcccacaccggccctctccccagaggacaaggccgtgctgcaaaacctaaagcgcatcctggctaaggtgcaggagatgcgggaccagcgcgtgtccctggagcagcagctgcgtgagcttatccagaaagatgacatcactgcctcgctggtcaccacagaccactcagagatgaagaagttgttcgaggagcagctgaaaaagtatgaccagctgaaggtgtacctggagcagaacctggccgcccaggaccgtgtcctctgtgcactgacagaggccaacgtgcagtacgcagccgtgcggcgggtactcagcgacttggaccaaaagtggaactccacgctgcagaccctggtggcctcgtatgaagcctatgaggacctgatgaagaagtcgcaggagggcagggacttctacgcagatctggagagcaaggtggctgctctgctggagcgcacgcagtccacctgccaggcccgcgaggctgcccgccagcagctcctggacagggagctgaagaagaagccgccgccacggcccacagccccaaagccgctgctgccccgcagggaggagagtgaggcagtggaagcaggagacccccctgaggagctgcgcagcctcccccctgacatggtggctggcccacgactgcctgacaccttcctgggaagtgccaccccgctccactttcctcccagccccttccccagctccacaggcccaggaccccactatctctcaggccccttgccccctggtacctactcgggccccacccagctgatacagcccagggccccagggccccatgcaatgcccgtagcacctgggcctgccctctacccagcccctgcctacacaccggagctgggccttgtgccccgatcctccccacagcatggcgtggtgagcagtccctatgtgggggtagggccggccccaccagttgcaggtctcccctcggccccacctcctcaattctcaggccccgagttggccatggcggttcggccagccaccaccacagtagatagcatccaggcgcccatccccagccacacagccccacggccaaaccccacccctgctcctcccccgccctgcttccctgtgcccccaccgcagccactgcccacgccttacacctaccctgcaggggctaagcaacccatcccggcacagcaccacttctcttctgggatccccgcaggttttccagccccaaggattgggccccagccccagccccatcctcagccccatccttcacaagcgtttgggcctcagcccccacagcagccccttccactccagcatccacatctcttcccaccccaggccccaggactcctacccccacaatccccctacccctatgcccctcagcctggggtcctggggcagccgccaccccccctacacacccagctctacccaggtcccgctcaagaccctctgccagcccactcaggggctctgcctttccccagccctgggccccctcagcctccccatcccccactggcatatggtcctgccccttctaccagacccatgggcccccaggcagcccctcttaccattcgagggccctcgtctgctggccagtccacccctagtccccacctggtgccttcacctgccccatctccagggcctggtccggtaccccctcgccccccagcagcagaaccacccccttgcctgcgccgaggcgccgcagctgcagacctgctctcctccagcccggagagccagcatggcggcactcagtctcctgggggtgggcagcccctgctgcagcccaccaaggtggatgcagctgagggtcgtcggccgcaggccctgcggctgattgagcgggacccctatgagcatcctgagaggctgcggcagttgcagcaggagctggaggcctttcggggtcagctgggggatgtgggagctctggacactgtctggcgagagctgcaagatgcgcaggaacatgatgcccgaggccgttccatcgccattgcccgctgctactcactgaagaaccggcaccaggatgtcatgccctatgacagtaaccgtgtggtgctgcgctcaggcaaggatgactacatcaatgccagctgcgtggaggggctctccccatactgccccccgctagtggcaacccaggccccactgcctggcacagctgctgacttctggctcatggtccatgagcagaaagtgtcagtcattgtcatgctggtttctgaggctgagatggagaagcaaaaagtggcacgctacttccccaccgagaggggccagcccatggtgcacggtgccctgagcctggcattgagcagcgtccgcagcaccgaaacccatgtggagcgcgtgctgagcctgcagttccgagaccagagcctcaagcgctctcttgtgcacctgcacttccccacttggcctgagttaggcctgcccgacagccccagcaacttgctgcgcttcatccaggaggtgcacgcacattacctgcatcagcggccgctgcacacgcccatcattgtgcactgcagctctggtgtgggccgcacgggagcctttgcactgctctatgcagctgtgcaggaggtggaggctgggaacggaatccctgagctgcctcagctggtgcggcgcatgcggcagcagagaaagcacatgctgcaggagaagctgcacctcaggttctgctatgaggcagtggtgagacacgtggagcaggtcctgcagcgccatggtgtgcctcctccatgcaaacccttggccagtgcaagcatcagccagaagaaccaccttcctcaggactcccaggacctggtcctcggtggggatgtgcccatcagctccatccaggccaccattgccaagctcagcattcggcctcctggggggttggagtccccggttgccagcttgccaggccctgcagagcccccaggcctcccgccagccagcctcccagagtctaccccaatcccatcttcctccccgccccccctttcctccccactacctgaggctccccagcctaaggaggagccgccagtgcctgaagcccccagctcggggcccccctcctcctccctggaattgctggcctccttgaccccagaggccttctccctggacagctccctgcggggcaaacagcggatgagcaagcataactttctgcaggcccataacgggcaagggctgcgggccacccggccctctgacgaccccctcagccttctggatccactctggacactcaacaagacctgaacaggttttgcctacctggtccttacactacatcatcatcatctcatgcccacctgcccacacccagcagagcttctcagtgggcacagtctcttactcccatttctgctgcctttggccctgcctggcccagcctgcacccctgtggggtggaaatgtactgcaggctctgggtcaggttctgctcctttatgggacccgacatttttcagctctttgctattgaaataataaaccaccctgttctgtggcccgtaaaaaaaaaaaaaaaaaaaa

SEQ ID NO: 1848 - DNA, 3201 bp, Homo sapiens
gccggggctggggggtgccaaacccacccggcggctgcgccagcgactctgcagctgaagcgcatttggtgaggcggtcgggcgagggagcgcgcacggagcgcgggacggagcgccaggcggacggaccgaaggacggaggcaccgaaggacggacgcccccgcacacgcagacgcacagagctcggcgcggcccccgtcgcatacacactggcacagacacaagcagggacacacgcagacacacgcacactcgcgcgcgcatcctcccgccagcctgcccgcctgctcgccggcgcccggagcccgctctggccgctggatgatctgaagctgccctctctccttcatttatatcaccagcttgctttttgctgagaaagcttcctgccctggaagatggcacccttccccatccagacaccttgggaatgaattatgagggagccaggagtgagagagagaaccacgctgctgatgactccgagggaggggccctggacatgtgctgcagtgagaggctaccgggtctcccccagccgatagtgatggaggcactggacgaggctgaagggctccaggactcacagagagagatgccgccaccccctcctccctcgccgccctcagatccagctcagaagccaccacctcgaggcgctgggagccactccctcactgtcaggagcagcctgtgcctgttcgctgcctcacagttcctgcttgcctgtggggtgctctggttcagcggttatggccacatctggtcacagaacgccacaaacctcgtctcctctttgctgacgctcctgaaacagctggaacccacggcctggcttgactctgggacgtggggagtccccagtctgctgctggtctttctgtccgtgggcctggtcctcgttaccaccctggtgtggcacctcctgaggacacccccagagccacccaccccactgccccctgaggacaggcgccagtcagtgagccgccagccctccttcacctactcagagtggatggaggagaagatcgaggatgacttcctggacctcgacccggtgcccgagactcctgtgtttgattgtgtgatggacatcaagcctgaggctgaccccacctcactcaccgtcaagtccatgggtctgcaggagaggaggggttccaatgtctccctgaccctggacatgtgcactccgggctgcaacgaggagggctttggctatctcatgtccccacgtgaggagtccgcccgcgagtacctgctcagcgcctcccgtgtcctccaagcagaagagcttcatgaaaaggccctggaccctttcctgctgcaggcggaattctttgaaatccccatgaactttgtggatccgaaagagtacgacatccctgggctggtgcggaagaaccggtacaaaaccatacttcccaaccctcacagcagagtgtgtctgacctcaccagaccctgacgaccctctgagttcctacatcaatgccaactacatccggggctatggtggggaggagaaggtgtacatcgccactcagggacccatcgtcagcacggtcgccgacttctggcgcatggtgtggcaggagcacacgcccatcattgtcatgatcaccaacatcgaggagatgaacgagaaatgcaccgagtattggccggaggagcaggtggcgtacgacggtgttgagatcactgtgcagaaagtcattcacacggaggattaccggctgcgactcatctccctcaagagtgggactgaggagcgaggcctgaagcattactggttcacatcctggcccgaccagaagaccccagaccgggcccccccactcctgcacctggtgcgggaggtggaggaggcagcccagcaggaggggccccactgtgcccccatcatcgtccactgcagtgcagggattgggaggaccggctgcttcattgccaccagcatctgctgccagcagctgcggcaggagggtgtggtggacatcctgaagaccacgtgccagctccgtcaggacaggggcggcatgatccagacatgcgagcagtaccagtttgtgcaccacgtcatgagcctctacgaaaagcagctgtcccaccagtccccagaatgactgcgcttctcctacaaggttctctgggcactgcccagcctgagtctcggccctcacccagggccctgcctcgggtcctgggcctgctccccgcttcctccccttcagtcagctccctctgtcctctgtcagcctggcctgacccctaccctccagcattgctcttcctactgtacatattggggagtggggggcagggtcgggaagggacatgccaggccaggcctggggccccggggcctgacccacaccacgcagaccccgggctccagtttttaacgatggttccatcaatacctgatccagaatgtttccgtgctacactttgtgtcctgctgcaatgtgttctgtctgtccatccatctctgccctctgtaccggacactgtgtctcctcagccaggaaggggtaatgagctccagcccctaagcaaccggacttgcctgcctcggcctcacccgcacttctcccaaaaggcagatgacggggagttaggcatggggagctccagaaggtcaccagagagctttcagctgagggagagttctctaggttggagtgggcatcacagccagggtggcctctgggtgtcagatgctctcaggagggtgcccagcctgtgaggcactggcaaggtagggggcagatggggcatggagaacccagaggatctaggccctgttggggaggggaggggagctcaaggtttgggtggggactcagcccagatctacgtgagacatttttctgtgtcactgtgggaaagccttcccagaagtctcactgcgtgttgctctgcgtgtgttcccatgtccatgcgtgtgttgagagcccatcaggagggcatgcatgactctttggcaacatgtattatcttggagccacgtgtttttattgctgactttaaatatttatcccacggcagacagagacatttggtgtctttttataattcgctcgtggtcattgaatagagcaataaacggagcattttgagcaaaactaaaaaaaaaaaaaaaaaaaaaaaaaaaaaaaaaaaaaaaaaaaaaaaaaaaaaaaaaaaaaaaaaaaa

SEQ ID NO: 1849 - DNA, 3156 bp, Homo sapiens
gccggggctggggggtgccaaacccacccggcggctgcgccagcgactctgcagctgaagcgcatttggtgaggcggtcgggcgagggagcgcgcacggagcgcgggacggagcgccaggcggacggaccgaaggacggaggcaccgaaggacggacgcccccgcacacgcagacgcacagagctcggcgcggcccccgtcgcatacacactggcacagacacaagcagggacacacgcagacacacgcacactcgcgcgcgcatcctcccgccagcctgcccgcctgctcgccggcgcccggagcccgctctggccgcttgctttttgctgagaaagcttcctgccctggaagatggcacccttccccatccagacaccttgggaatgaattatgagggagccaggagtgagagagagaaccacgctgctgatgactccgagggaggggccctggacatgtgctgcagtgagaggctaccgggtctcccccagccgatagtgatggaggcactggacgaggctgaagggctccaggactcacagagagagatgccgccaccccctcctccctcgccgccctcagatccagctcagaagccaccacctcgaggcgctgggagccactccctcactgtcaggagcagcctgtgcctgttcgctgcctcacagttcctgcttgcctgtggggtgctctggttcagcggttatggccacatctggtcacagaacgccacaaacctcgtctcctctttgctgacgctcctgaaacagctggaacccacggcctggcttgactctgggacgtggggagtccccagtctgctgctggtctttctgtccgtgggcctggtcctcgttaccaccctggtgtggcacctcctgaggacacccccagagccacccaccccactgccccctgaggacaggcgccagtcagtgagccgccagccctccttcacctactcagagtggatggaggagaagatcgaggatgacttcctggacctcgacccggtgcccgagactcctgtgtttgattgtgtgatggacatcaagcctgaggctgaccccacctcactcaccgtcaagtccatgggtctgcaggagaggaggggttccaatgtctccctgaccctggacatgtgcactccgggctgcaacgaggagggctttggctatctcatgtccccacgtgaggagtccgcccgcgagtacctgctcagcgcctcccgtgtcctccaagcagaagagcttcatgaaaaggccctggaccctttcctgctgcaggcggaattctttgaaatccccatgaactttgtggatccgaaagagtacgacatccctgggctggtgcggaagaaccggtacaaaaccatacttcccaaccctcacagcagagtgtgtctgacctcaccagaccctgacgaccctctgagttcctacatcaatgccaactacatccggggctatggtggggaggagaaggtgtacatcgccactcagggacccatcgtcagcacggtcgccgacttctggcgcatggtgtggcaggagcacacgcccatcattgtcatgatcaccaacatcgaggagatgaacgagaaatgcaccgagtattggccggaggagcaggtggcgtacgacggtgttgagatcactgtgcagaaagtcattcacacggaggattaccggctgcgactcatctccctcaagagtgggactgaggagcgaggcctgaagcattactggttcacatcctggcccgaccagaagaccccagaccgggcccccccactcctgcacctggtgcgggaggtggaggaggcagcccagcaggaggggccccactgtgcccccatcatcgtccactgcagtgcagggattgggaggaccggctgcttcattgccaccagcatctgctgccagcagctgcggcaggagggtgtggtggacatcctgaagaccacgtgccagctccgtcaggacaggggcggcatgatccagacatgcgagcagtaccagtttgtgcaccacgtcatgagcctctacgaaaagcagctgtcccaccagtccccagaatgactgcgcttctcctacaaggttctctgggcactgcccagcctgagtctcggccctcacccagggccctgcctcgggtcctgggcctgctccccgcttcctccccttcagtcagctccctctgtcctctgtcagcctggcctgacccctaccctccagcattgctcttcctactgtacatattggggagtggggggcagggtcgggaagggacatgccaggccaggcctggggccccggggcctgacccacaccacgcagaccccgggctccagtttttaacgatggttccatcaatacctgatccagaatgtttccgtgctacactttgtgtcctgctgcaatgtgttctgtctgtccatccatctctgccctctgtaccggacactgtgtctcctcagccaggaaggggtaatgagctccagcccctaagcaaccggacttgcctgcctcggcctcacccgcacttctcccaaaaggcagatgacggggagttaggcatggggagctccagaaggtcaccagagagctttcagctgagggagagttctctaggttggagtgggcatcacagccagggtggcctctgggtgtcagatgctctcaggagggtgcccagcctgtgaggcactggcaaggtagggggcagatggggcatggagaacccagaggatctaggccctgttggggaggggaggggagctcaaggtttgggtggggactcagcccagatctacgtgagacatttttctgtgtcactgtgggaaagccttcccagaagtctcactgcgtgttgctctgcgtgtgttcccatgtccatgcgtgtgttgagagcccatcaggagggcatgcatgactctttggcaacatgtattatcttggagccacgtgtttttattgctgactttaaatatttatcccacggcagacagagacatttggtgtctttttataattcgctcgtggtcattgaatagagcaataaacggagcattttgagcaaaactaaaaaaaaaaaaaaaaaaaaaaaaaaaaaaaaaaaaaaaaaaaaaaaaaaaaaaaaaaaaaaaaaaaa

SEQ ID NO: 1850 - DNA, 3263 bp, Homo sapiens
ccagaaacagacctgggagtggaacagcagcagttaggagaggaccctgctggggtccaggagcccgcctgcctggctgcccaaccagctccaacactgctggaggcctccattctctgttcaggggaaggcccactggttagctcagagatggcttctgcgtgctttctcccttccgtcctagagaacacatattttctgtttcctcccttgccttctcccacttggacctgctcagagccctgtgtactctggtgtgtggcctctctcccctctctcttttcctccttctggattctttcctatcttcatccacaatctctaccctttatcttgccgttactctaccccgagactgccttctgccctgggtcccaccaaatagatcctgtccttcccttagtgaaaatgaggccacctcttggggaacagaagacgccccagtgaaaacagagtgcaaacctggcctggcatgggagcctccttctggccaatcaggcaggccagagaacagcagcggagggccctgtctttcaggcagacctcatggctgagtgagcctcccctgggcccagcaccccacctcagcatggtccaagcccatggggggcgctccagagcacagccgttgaccttgtctttgggggcagccatgacccagcctccgcctgaaaaaacgccagccaagaagcatgtgcgactgcaggagaggcggggctccaatgtggctctgatgctggacgttcggtccctgggggccgtagaacccatctgctctgtgaacacaccccgggaggtcaccctacactttctgcgcactgctggacacccccttacccgctgggcccttcagcgccagccacccagccccaagcaactggaagaagaattcttgaagatcccttcaaactttgtcagccccgaagacctggacatccctggccacgcctccaaggaccgatacaagaccatcttgccaaatccccagagccgtgtctgtctaggccgggcacagagccaggaggacggagattacatcaatgccaactacatccgaggctatgacgggaaggagaaggtctacattgccacccagggccccatgcccaacactgtgtcggacttctgggagatggtgtggcaagaggaagtgtccctcattgtcatgctcactcagctccgagagggcaaggagaaatgtgtccactactggcccacagaagaggaaacctatggacccttccagatccgcatccaggacatgaaagagtgcccagaatacactgtgcggcagctcaccatccagtaccaggaagagcgccggtcagtaaagcacatcctcttttcggcctggccagaccatcagacaccagaatcagctgggcccctgctgcgcctagtggcagaggtggaggagagcccggagacagccgcccaccccgggcctatcgtagtccactgcagtgcagggattggccggacgggctgcttcatcgccacgcgaattggctgtcaacagctgaaagcccgaggagaagtggacattctgggtattgtgtgccaactgcggctagacagaggggggatgatccagacggcagagcagtaccagttcctgcaccacactttggccctgtatgcaggccagctgcctgaggaacccagcccctgacccctgccaccctccggtggcccaggtgcctacctccctcaagcctgggaaggtgggtctggggaaagtgggccgagtgatctgggggtaccccttgggttggtgtggggaaggagtgcctccttagtggtgcttgcagtcacaggaagcagcagcagtaaggacaaggggccggattccaggtcttcaacactggccactcctctgcttcctctgttggccccagatggacagtaaggggaacctccaatgtctctctgaacttaaagacaggagctggcatttatgacagacaaagaaagaagcccaggtgtcctggtgttctctgagacactctttgtgagcttcagtttcctgttctataacatgaacataagtgcttagctgccatgagggaaaagtaatgagagaagtttctagaagccactccagccactccttcctggggctgacaaaagggtgattccaagatcatccttcacccgaggtcctgcccaagcacaggccagatgcaagaatggggaaaagtctggtcctgatctccaagtctcaacatcctatcagtgactctgctccctgaccacacatcggaagggctggatgaccccaatcaaaagaaagaacaaggactctggttacccttgcctccacccatgtgtcataagagtaggctacagaggtgaccaggcctggcagttgaaatctctggaagagggaacatgtggggactactcagaggcaaagaggagctgctcctgcctccatggttgctggccactcccaccaactactcttagggaggctaagcagtctctgttttgcttccatggctcaaataataccctgggtatgcaggacccactataccttgcatttgctgagtacacctagagagcttggctgtttccaaaaacaatcagggtcataaccatccatgcagacatggaggctcggctgaaccaggactcctcactgtctacctgagagaatgagcacccctcatccatctcagcatcaacacaatttccaggggacctcaggtctacctcaggactgaacgccacacctcaggattcctcctccttgaatctgagactggctgcccattctgagatggggatgaaggtaagatgccgcatcaccaggcacgccgcccctgacagctgccttgataccagctctctgtggaaacccccgaggagttggatctggagaacagctgggcctcctcactcaggacttctctcctgaagaacacgcagtgctaaaactgaggatgatttccctaatgcttctgcttggccttatggaggagctgctccttccttacagccttggggatggacttgcccacacctccacctcccctgagccctgtgagaggcacgactgtctatgccaatgaggctcggtggggggctctcaagtgcctgatcctgccctgggctcagagccagcccagagggaagcaactgcacagccccacaggccctccctggcactgtccccccaaccccatctcagagctcagagggtacaagctccagaacagtaaccaagtgggaaaataaagacttcttggatgactgac

SEQ ID NO: 1851 - DNA, 2805 bp, Homo sapiens
gccttctcagccctcaaagacagaccgacagacagacagacagctggcaagaggcagcctgggggccacagctgcttcagcagacctcatggctgagtgagcctcccctgggcccagcaccccacctcagcatggtccaagcccatggggggcgctccagagcacagccgttgaccttgtctttgggggcagccatgacccagcctccgcctgaaaaaacgccagccaagaagcatgtgcgactgcaggagaggcggggctccaatgtggctctgatgctggacgttcggtccctgggggccgtagaacccatctgctctgtgaacacaccccgggaggtcaccctacactttctgcgcactgctggacacccccttacccgctgggcccttcagcgccagccacccagccccaagcaactggaagaagaattcttgaagatcccttcaaactttgtcagccccgaagacctggacatccctggccacgcctccaaggaccgatacaagaccatcttgccaaatccccagagccgtgtctgtctaggccgggcacagagccaggaggacggagattacatcaatgccaactacatccgaggctatgacgggaaggagaaggtctacattgccacccagggccccatgcccaacactgtgtcggacttctgggagatggtgtggcaagaggaagtgtccctcattgtcatgctcactcagctccgagagggcaaggagaaatgtgtccactactggcccacagaagaggaaacctatggacccttccagatccgcatccaggacatgaaagagtgcccagaatacactgtgcggcagctcaccatccagtaccaggaagagcgccggtcagtaaagcacatcctcttttcggcctggccagaccatcagacaccagaatcagctgggcccctgctgcgcctagtggcagaggtggaggagagcccggagacagccgcccaccccgggcctatcgtagtccactgcagtgcagggattggccggacgggctgcttcatcgccacgcgaattggctgtcaacagctgaaagcccgaggagaagtggacattctgggtattgtgtgccaactgcggctagacagaggggggatgatccagacggcagagcagtaccagttcctgcaccacactttggccctgtatgcaggccagctgcctgaggaacccagcccctgacccctgccaccctccggtggcccaggtgcctacctccctcaagcctgggaaggtgggtctggggaaagtgggccgagtgatctgggggtaccccttgggttggtgtggggaaggagtgcctccttagtggtgcttgcagtcacaggaagcagcagcagtaaggacaaggggccggattccaggtcttcaacactggccactcctctgcttcctctgttggccccagatggacagtaaggggaacctccaatgtctctctgaacttaaagacaggagctggcatttatgacagacaaagaaagaagcccaggtgtcctggtgttctctgagacactctttgtgagcttcagtttcctgttctataacatgaacataagtgcttagctgccatgagggaaaagtaatgagagaagtttctagaagccactccagccactccttcctggggctgacaaaagggtgattccaagatcatccttcacccgaggtcctgcccaagcacaggccagatgcaagaatggggaaaagtctggtcctgatctccaagtctcaacatcctatcagtgactctgctccctgaccacacatcggaagggctggatgaccccaatcaaaagaaagaacaaggactctggttacccttgcctccacccatgtgtcataagagtaggctacagaggtgaccaggcctggcagttgaaatctctggaagagggaacatgtggggactactcagaggcaaagaggagctgctcctgcctccatggttgctggccactcccaccaactactcttagggaggctaagcagtctctgttttgcttccatggctcaaataataccctgggtatgcaggacccactataccttgcatttgctgagtacacctagagagcttggctgtttccaaaaacaatcagggtcataaccatccatgcagacatggaggctcggctgaaccaggactcctcactgtctacctgagagaatgagcacccctcatccatctcagcatcaacacaatttccaggggacctcaggtctacctcaggactgaacgccacacctcaggattcctcctccttgaatctgagactggctgcccattctgagatggggatgaaggtaagatgccgcatcaccaggcacgccgcccctgacagctgccttgataccagctctctgtggaaacccccgaggagttggatctggagaacagctgggcctcctcactcaggacttctctcctgaagaacacgcagtgctaaaactgaggatgatttccctaatgcttctgcttggccttatggaggagctgctccttccttacagccttggggatggacttgcccacacctccacctcccctgagccctgtgagaggcacgactgtctatgccaatgaggctcggtggggggctctcaagtgcctgatcctgccctgggctcagagccagcccagagggaagcaactgcacagccccacaggccctccctggcactgtccccccaaccccatctcagagctcagagggtacaagctccagaacagtaaccaagtgggaaaataaagacttcttggatgactgac

SEQ ID NO: 1852 - DNA, 2769 bp, Homo sapiens
ctaggtgggtgtcccctcggtgcttcccagctgccgtctgcaccagccatggactgctacacggcgaactggaacccactcggggactctgccttttaccggaaatatgagctgtacagcatggactgggacctgaaggaggaactcagggattgcctggtggctgctgcaccctatgggggccccattgcactgctgaggaacccctggcggaaggagaaagctgctagtgtgaggccagtgctcgatatatactctgcttccggcatgcctctggccagcctgctgtggaagagtggacccgtggtgtccctgggctggtcagctgaggaggagctgctctgtgtgcaggaagatggtgctgtactggtttatgggcttcatggtgacttccggagacacttcagcatgggcaatgaagtgctccagaaccgggttctggatgcccggatctttcacactgagtttggttccggagtggccatcctcacaggggcccaccgcttcaccctcagtgccaatgtgggtgacctcaaactccgccggatgccagaggtgccaggtctgcaaagtgcaccctcctgctggactgtgctgtgccaggaccgagtggcacacattcttctggctgtggggcctgacctttacctcttggaccatgcagcctgctccgcagtgacgccccctggcctggccccaggagtaagcagcttcctacagatggctgtctccttcacctaccgacacctggcactcttcacagacacaggctacatctggatggggacagcatcactcaaggagaagctatgtgagttcaactgcaacatccgggcacctccaaagcagatggtctggtgcagccgtcctcgtagcaaggagagggccgtggtggtggcctgggaaaggcggctgatggtggtgggcgatgcacccgagagcatccagtttgtgctggatgaggactcctacctggtgcctgagctcgatggggtccgcatcttctcccgcagcacccacgagttcctgcatgaggttccagcggccagcgaggaaatcttcaaaattgcctcaatggcccccggggcgctgctcctggaggctcagaaggagtatgagaaagagagccagaaggcggacgagtacctgcgggagatccaggagctgggccagctgacccaggccgtgcagcagtgcattgaggctgcaggacatgagcaccagccagacatgcagaagagtctgctcagggccgcctccttcggaaagtgtttcctggacagatttccacccgacagcttcgtgcacatgtgtcaggacctgcgtgtgctcaatgctgttcgggactatcacatcgggatcccgctcacctatagccaatataagcagctcaccatccaggtgctgctggacaggctcgtgttgcggagactttaccccctggccatccagatatgcgagtacttgcgccttcctgaagtacagggcgtcagcaggatcctggcccactgggcctgctacaaggtgcaacagaaggatgtctcagatgaggatgtggctcgagccattaaccagaagctgggggacacgcctggtgtctcttactccgacattgctgcacgagcctatggttgtggccgcacggagctggccatcaagctgctggagtatgagccacgctcaggggagcaggtaccccttctcctaaagatgaagaggagcaaactggcactaagcaaggccatcgagagcggggacactgacctggtgttcacggtgttgctgcacctgaagaacgagctgaaccgaggagattttttcatgacccttcggaatcagcccatggccctcagtttgtaccgacagttctgtaagcatcaggagctagagacgctgaaggacctttacaatcaggatgacaatcaccaggaattgggcagcttccacatccgagccagctatgctgcagaagagcgtattgaggggcgagtagcagctctgcagacagccgccgatgccttctacaaggccaagaatgagtttgcagccaaggctacagaggatcaaatgcggctcctacggctgcagcggcgcctagaagacgagctggggggccagttcctagacctgtctctacatgacacagttaccaccctcattcttggcggtcacaacaagcgtgcagagcagctggcacgtgacttccgcatccctgacaagaggctctggtggctgaagctgactgccctggcagatttggaagattgggaagagctagagaagttttccaagagcaagaaatcacccattggctacctgccttttgtggagatctgcatgaaacaacataacaaatacgaagccaagaagtatgcttcccgcgtgggtcccgagcagaaggtcaaggctttgcttcttgttggcgatgtggctcaggctgcagatgtggccatcgaacaccggaatgaggctgagctgagcctcgtattgtcccactgcacgggagccacagatggggccacagctgacaagattcaacgggccagggcacaagcccagaagaagtgaggagtccatcctgtacatctcaagcaaggggttcctcccctagcacctgggcttggcagaagggccatagttcatccagctcctcccctagagcaatgctgaggagcgggggcatggtagcagggctgtctggttttaaataaagttggaacacttcaaaaaaaaaaaaaaaaaaaaaaaaaaaaaaaaaaaaaaaaaaaa

SEQ ID NO: 1853 - DNA, 2337 bp, Homo sapiens
ctaggtgggtgtcccctcggtgcttcccagctgccgtctgcaccagccatggactgctacacggcgaactggaacccactcggggactctgccttttaccggaaatatgagctgtacagcatggactgggacctgaaggaggaactcagggattgcctggtggctgctgcaccctatgggggccccattgcactgctgaggaacccctggcggaaggagaaagctgctagtgtgaggccagtgctcgatatatactctgcttccggcatgcctctggccagcctgctgtggaagagtggacccgtggtgtccctgggctggtcagctgaggaggagctgctctgtgtgcaggaagatggtgctgtactggtttatgggcttcatggtgacttccggagacacttcagcatgggcaatgaagtgctccagaaccgggttctggatgcccggatctttcacactgagtttggttccggagtggccatcctcacaggggcccaccgcttcaccctcagtgccaatgtgggtgacctcaaactccgccggatgccagaggtgccaggtctgcaaagtgcaccctcctgctggactgtgctgtgccaggaccgagtggcacacattcttctggctgtggggcctgacctttacctcttggaccatgcagcctgctccgcagtgacgccccctggcctggccccaggagtaagcagcttcctacagatggctgtctccttcacctaccgacacctggcactcttcacagacacaggctacatctggatggggacagcatcactcaaggagaagctatgtgagttcaactgcaacatccgggcacctccaaagcagatggtctggtgcagccgtcctcgtagcaaggagagggccgtggtggtggcctgggaaaggcggctgatggtggtgggcgatgcacccgagagcatccaatataagcagctcaccatccaggtgctgctggacaggctcgtgttgcggagactttaccccctggccatccagatatgcgagtacttgcgccttcctgaagtacagggcgtcagcaggatcctggcccactgggcctgctacaaggtgcaacagaaggatgtctcagatgaggatgtggctcgagccattaaccagaagctgggggacacgcctggtgtctcttactccgacattgctgcacgagcctatggttgtggccgcacggagctggccatcaagctgctggagtatgagccacgctcaggggagcaggtaccccttctcctaaagatgaagaggagcaaactggcactaagcaaggccatcgagagcggggacactgacctggtgttcacggtgttgctgcacctgaagaacgagctgaaccgaggagattttttcatgacccttcggaatcagcccatggccctcagtttgtaccgacagttctgtaagcatcaggagctagagacgctgaaggacctttacaatcaggatgacaatcaccaggaattgggcagcttccacatccgagccagctatgctgcagaagagcgtattgaggggcgagtagcagctctgcagacagccgccgatgccttctacaaggccaagaatgagtttgcagccaaggctacagaggatcaaatgcggctcctacggctgcagcggcgcctagaagacgagctggggggccagttcctagacctgtctctacatgacacagttaccaccctcattcttggcggtcacaacaagcgtgcagagcagctggcacgtgacttccgcatccctgacaagaggctctggtggctgaagctgactgccctggcagatttggaagattgggaagagctagagaagttttccaagagcaagaaatcacccattggctacctgccttttgtggagatctgcatgaaacaacataacaaatacgaagccaagaagtatgcttcccgcgtgggtcccgagcagaaggtcaaggctttgcttcttgttggcgatgtggctcaggctgcagatgtggccatcgaacaccggaatgaggctgagctgagcctcgtattgtcccactgcacgggagccacagatggggccacagctgacaagattcaacgggccagggcacaagcccagaagaagtgaggagtccatcctgtacatctcaagcaaggggttcctcccctagcacctgggcttggcagaagggccatagttcatccagctcctcccctagagcaatgctgaggagcgggggcatggtagcagggctgtctggttttaaataaagttggaacacttcaaaaaaaaaaaaaaaaaaaaaaaaaaaaaaaaaaaaaaaaaaaa

SEQ ID NO: 1854 - DNA, 1301 bp, Homo sapiens
aggtgcaacagaaggatgtctcagatgaggatgtggctcgagccattaaccagaagctgggggacacgcctggtgtctcttactccgacattgctgcacgagcctatggttgtggccgcacggagctggccatcaaggtgtgggtgcccagccctccacagacactctgatgtggttgttcagggcccccatgccagctccttctctctgtgccttccttctcacctcacagctgctggagtatgagccacgctcaggggagcaggtaccccttctcctaaagatgaagaggagcaaactggcactaagcaaggccatcgagagcggggacactgacctggtgttcacggtgttgctgcacctgaagaacgagctgaaccgaggagattttttcatgacccttcggaatcagcccatggccctcagtttgtaccgacagttctgtaagcatcaggagctagagacgctgaaggacctttacaatcaggatgacaatcaccaggaattgggcagcttccacatccgagccagctatgctgcagaagagcgtattgaggggcgagtagcagctctgcagacagccgccgatgccttctacaaggccaagaatgagtttgcagccaaggctacagaggatcaaatgcggctcctacggctgcagcggcgcctagaagacgagctggggggccagttcctagacctgtctctacatgacacagttaccaccctcattcttggcggtcacaacaagcgtgcagagcagctggcacgtgacttccgcatccctgacaagaggctctggtggctgaagctgactgccctggcagatttggaagattgggaagagctagagaagttttccaagagcaagaaatcacccattggctacctgccttttgtggagatctgcatgaaacaacataacaaatacgaagccaagaagtatgcttcccgcgtgggtcccgagcagaaggtcaaggctttgcttcttgttggcgatgtggctcaggctgcagatgtggccatcgaacaccggaatgaggctgagctgagcctcgtattgtcccactgcacgggagccacagatggggccacagctgacaagattcaacgggccagggcacaagcccagaagaagtgaggagtccatcctgtacatctcaagcaaggggttcctcccctagcacctgggcttggcagaagggccatagttcatccagctcctcccctagagcaatgctgaggagcgggggcatggtagcagggctgtctggttttaaataaagttggaacacttcaca

SEQ ID NO: 1855 - DNA, 3643 bp, Homo sapiens
ggagtatgagtcacgctcaggggagcaggtaccccttctcctaaagatgaagaggagcaaactggcactaagcaaggccatcgagagcggggacactgacctggtgttcacggtgttgctgcacctgaagaacgagctgaaccgaggagattttttcatgacccttcggaatcagcccatggccctcagtttgtaccgacagttctgtaagcatcaggagctagagacgctgaaggacctttacaatcaggatgacaatcaccaggaattgggcagcttccacatccgagccagctatgctgcagaagagcgtattgaggggcgagtagcagctctgcagacagccgccgatgccttctacaaggccaagaatgagtttgcagccaaggctacagaggatcaaatgcggctcctacggctgcagcggcgcctagaagacgagctggggggccagttcctagacctgtctctacatgacacagttaccaccctcattcttggcggtcacaacaagcgtgcagagcagctggcacgtgacttccgcatccctgacaagaggtgacacaactaaaaaaaaacaaaggtatttatggaattccactgagtggtaatggatgatgcagttcaaataactaaggacacatgttcaaagagcataattaactttttaaaagaagctaataagcatggattcctggttcattcttgttctgctcggcagtggtctgatatgtgtcagtgccaacaatgctaccacagttgcaccttctgtaggaattacaagattaattaactcatcaacggcagaaccagttaaagaagaggccaaaacttcaaatccaacttcttcactaacttctctttctgtggcaccaacattcagcccaaatataactctgggacccacctatttaaccactgtcaattcttcagactctgacaatgggaccacaagaacagcaagcaccaattctataggcattacaatttcaccaaatggaacgtggcttccagataaccagttcacggatgccagaacagaaccctgggaggggaattccagcaccgcagcaaccactccagaaactttccctccttcaggtaattctgactcgaaggacagaagagatgagacaccaattattgcggtgatggtggccctgtcctctctgctagtgatcgtgtttattatcatagttttgtacatgttaaggtttaagaaatacaagcaagctgggagccattccaattctttccgcttatccaacggccgcactgaggatgtggagccccagagtgtgccacttctggccagatccccaagcaccaacaggaaatacccacccctgcccgtggacaagctggaagaggaaattaaccggagaatggcagacgacaataagctcttcagggaggaattcaacgctctccctgcatgtcctatccaggccacctgtgaggctgcttccaaggaggaaaacaaggaaaaaaatcgatatgtaaacatcttgccttatgaccactctagagtccacctgacaccggttgaaggggttccagattctgattacatcaatgcttcattcatcaacggttaccaagaaaagaacaaattcattgctgcacaaggaccaaaagaagaaacggtgaatgatttctggcggatgatctgggaacaaaacacagccaccatcgtcatggttaccaacctgaaggagagaaaggagtgcaagtgcgcccagtactggccagaccaaggctgctggacctatgggaatattcgggtgtctgtagaggatgtgactgtcctggtggactacacagtacggaagttctgcatccagcaggtgggcgacatgaccaacagaaagccacagcgcctcatcactcagttccactttaccagctggccagactttggggtgccttttaccccgatcggcatgctcaagttcctcaagaaggtgaaggcctgtaaccctcagtatgcaggggccatcgtggtccactgcagtgcaggtgtagggcgtacaggtacctttgtcgtcattgatgccatgctggacatgatgcatacagaacggaaggtggacgtgtatggctttgtgagccggatccgggcacagcgctgccagatggtgcaaaccgatatgcagtatgtcttcatataccaagcccttctggagcattatctctatggagatacagaactggaagtgacctctctagaaacccacctgcagaaaatttacaacaaaatcccagggaccagcaacaatggattagaggaggagtttaagaagttaacatcaatcaaaatccagaatgacaagatgcggactggaaaccttccagccaacatgaagaagaaccgtgttttacagatcattccatatgaattcaacagagtgatcattccagttaagcggggcgaagagaatacagactatgtgaacgcatcctttattgatggctaccggcagaaggactcctatatcgccagccagggccctcttctccacacaattgaggacttctggcgaatgatctgggagtggaaatcctgctctatcgtgatgctaacagaactggaggagagaggccaggagaagtgtgcccagtactggccatctgatggactggtgtcctatggagatattacagtggaactgaagaaggaggaggaatgtgagagctacaccgtccgagacctcctggtcaccaacaccagggagaataagagccggcagatccggcagttccacttccatggctggcctgaagtgggcatccccagtgacggaaagggcatgatcagcatcatcgccgccgtgcagaagcagcagcagcagtcagggaaccaccccatcaccgtgcactgcagcgccggggcaggaaggacggggaccttctgtgccctgagcaccgtcctggagcgtgtgaaagcagaggggattttggatgtcttccagactgtcaagagcctgcggctacagaggccacacatggtccagacactggaacagtatgagttctgctacaaggtggtgcaggagtatattgatgcattctcagattatgccaacttcaagtaagcggcaacaagggtccgtggaccaggaggattgcctttaatattttgtaatattctgttttgttaatataccccaaattgtgtatatatcttataactgttttagaaattggtacataggcttctattacctattaggtggaaattttatatgtaaatgtgttagcactgatagtcctttttccaatgttttattggggaattaaatagtgtgatgtttggattgatatcgtgaaatcctcagccgagaaattgggctggattgtgctttggttaatacatctttccctaaagaagataaacacaaaatccattccaggtagctcggcaccaactaagaaaaaaagcacaaagttctcagagctctcgaggaaagtggttgtccccgtaccaccatgcactgtaaatatccctcccctctctccctggtcccctcccccatccccaccactgatatcatggggagtaataggaccagagcggtatctctggcaccacactagggactatcaggtaataaaagctttgactccctgaaaaaaaaaaaaa

SEQ ID NO: 1856 - DNA, 10051 bp, Homo sapiens
gcagtttattctgggcctgtgtggaatagaaagacaattctttatttgactggtaggaaagaaaagagaagactcctcagggtttccaaggaggactggagcggctgctttagtgaagaagtgaagaatcaaggaagtaaaggacctgtctcaaagtcacacaactaggaaatcttgaggagtctgatacttttcatcctccagctataaaatcatcttgtagggggaagctgtacattggtggaaaataaaaggcaagcagttcctggcccgtgatattccagttagaggtgtctgactgacagcatgttggcaccgagggaagcgatgggcttcggctccaggtttctgtcctgagaccacagcagaatgtgccttggacaaaggcttggactccttgatcttctggtaacttcaaaaatctggtctcagggtggtgaactttttcttcgaattcctaacctgtgagcttacgatgatggtgcctgtccattaactgaacaactgtggttttgaacttcttgaggccagggactgtgtctgaaaacaccgacggtggctaactcaagggagacgtctggtgaacacccgtgggatctaaagaacaagctctgaaagtgttccagctgaaatttcagatcggacagactcgctgcggctccggaggcagtgattccaagctgctcgcgcacgctgctgccaagctgcaggatggtgcacgtagccaggctgctgctgctgctcctcactttcttcctccgcacggatgctgagacacctccaaggtttacacgaacacccgttgatcagacaggggtctctggcggagttgcctctttcatctgccaagctacgggagacccaagacctaaaattgtctggaacaaaaaaggaaagaaagtcagcaatcagagatttgaggtaatagagtttgacgatgggtctggatcagttctcagaatacaacccttacggactccgagggatgaggccatttatgaatgtgtggcctcaaataatgtgggagaaataagtgtatccaccagactcacagttttgcgggaagatcaaattcccaggggcttccctaccattgacatgggcccacagttgaaggtggttgagcgtactcgcacggccaccatgctttgtgcagccagtggtaatccggatccagaaatcacttggtttaaagatttcttacctgtggacacaagcaacaacaatggtcgtattaagcagttacgatcagaatctattggtggtacaccaataagaggagcccttcagattgagcagagtgaagagtctgaccaaggaaaatatgagtgtgttgccaccaacagcgcgggcactcgctattccgctcctgccaatttatatgtcagagagctgcgagaagttcgccgtgtcccaccaagattctctatcccacccactaatcatgaaatcatgccaggcggaagcgttaatatcacctgtgtggccgtggggtcaccaatgccttatgtaaagtggatgttgggggcagaagatctgacacctgaagatgatatgccaataggaagaaatgtgctagaactgaatgatgtaagacagtcagcaaattacacctgtgttgctatgtcaacactgggtgtcattgaagcaatagcacagatcactgtcaaagccttacccaaacctccaggaactcctgtagtgaccgagagcacagctacaagcatcacactgacgtgggactctgggaaccctgagcctgtttcttattacataattcagcataaacctaaaaactctgaggaactttacaaagaaattgatggggtggcgaccacacgctacagtgtcgctggactaagtccctactcggattatgaattcagggttgttgctgtcaataacattgggcgggggcctcccagcgaacctgtgctaacacaaacctcagagcaagcaccatccagtgccccgagggatgtccaggcacgaatgttgagttcgaccaccattttggtacagtggaaggaacctgaagagccaaatggacagatccaaggatatagagtttattatacaatggatcccactcaacatgtcaacaactggatgaaacacaatgtagctgacagccaaatcactactattggcaacttagtgccccagaaaacatattctgtcaaagtcctggcttttacctcaattggagatggtcccctttcaagtgacatacaagtcatcactcagacaggagtaccagggcagccactaaacttcaaagcagaacctgagtctgaaacaagtattttgctctcttggacacctccacgttcagataccattgccaactatgaactggtctacaaagatggggagcatggagaggagcaacgaattaccattgagccagggacatcatataggctgcaaggactgaaaccaaacagcttatactatttccgtctggctgcacgctcccctcaaggcctgggtgcttctactgcagaaatatcagctagaaccatgcagtcaaagccgtcagctcctcctcaagacattagttgcaccagcccaagttccactagtattttggtaagttggcaacctccaccagtggaaaaacagaatggcattatcactgaatactccatcaagtacactgcagtggatggggaagatgacaagcctcacgagattttgggaattccttcggacactaccaaataccttttggaacagctggaaaaatggactgaataccggatcactgtgacagcccatacagatgtcggccctggccctgagagcttgtccgtgttgattcgaaccaatgaagatgttcctagtggtcctcctcgcaaagtcgaggtagaggctgtcaactcaacatctgttaaagtctcatggcgctcacccgtgcccaataaacagcatggccagataagaggatatcaggtgcattatgtgaggatggaaaatggtgagcccaagggccagcccatgctgaaagatgtcatgctggctgatgcacaggacatgatcatttctgggctccagcctgaaacttcctactccctcaccgtcacagcctacacaaccaaaggagatggtgctcgcagcaagcccaaactggtgtccaccactggggcagttccagggaaacctcggcttgtgattaaccacactcagatgaatactgctcttattcagtggcaccctccggtggacacatttggacctcttcagggctaccgtctaaaatttggccgcaaggatatggagccacttactactcttgagttctctgaaaaagaagatcactttacagctacagacatccacaagggagcatcatacgtcttcaggctctcagccagaaacaaagtgggctttggggaggagatggtgaaggagatttccattccagaagaagtaccaactggattccctcaaaaccttcactcagaaggcaccacttcaacctccgtccagttatcttggcaaccacctgtcctggcagagagaaatggcattatcaccaagtatacccttctttatagggatatcaacatcccccttctcccgatggagcagcttattgttccagctgacaccactatgacactcactggcttaaaaccagataccacatacgatgtaaaagtacgtgctcatacgagcaaagggcccgggccatatagtcccagtgtccagttcaggacactgcctgtggatcaagtgtttgcaaaaaattttcatgtcaaagcagtaatgaagacttccgtgttgctgtcttgggagattccagagaattataactccgccatgcctttcaaaattctttatgatgatgggaaaatggtagaagaagtggatggccgagccacacagaagttaattgtcaacctgaagcctgagaaatcatattcatttgtgctgacaaatcgtggaaacagtgctggtgggctgcagcacagggtcacggcaaagactgcaccagatgtattacgtaccaagcctgccttcattgggaagaccaacttggatggcatgattactgtgcaactgcctgaagtacctgcaaatgagaatataaaaggttactacataataattgtgcctttgaagaaatctcgcgggaaatttatcaagccatgggagagtccagatgaaatggaattagatgagctgcttaaggagatatctaggaagcgcagaagcatccgttatgggagagaagttgaattaaagccatatattgccgctcactttgatgtccttcccactgagttcaccctgggggatgacaagcattatggtggatttacaaacaagcaactccaaagtggtcaagaatatgtcttctttgtgttagcagtaatggaacatgcagagtctaagatgtatgcaaccagcccttactccgaccccgtggtgtcaatggatctggatccgcagccaatcacggatgaagaagaaggcttgatctgggttgtaggtcctgtccttgcagtggtctttatcatctgcattgtcattgctattcttctttataaaaggaagagggcagagtccgactctagaaaaagcagcataccgaacaataaggagatcccttcacaccacccaacagaccctgtagaactgaggcgccttaactttcaaacaccgggtatggctagccatcctccaatacccatcttggaacttgcagaccacattgaaagattgaaagcaaatgacaacttgaagttttcccaggaatatgagtcaattgaccctggccagcagttcacttgggaacattcaaacttggaagtaaacaaaccaaagaatagatacgcgaatgtaatcgcatatgatcattcccgggttctcctatcagctatagaagggatcccaggaagtgactatgtgaatgccaactacatagatgggtataggaagcaaaatgcctatattgcaacacagggatctctccccgaaacatttggggacttttggagaatgatatgggaacaacggagtgccacagttgtcatgatgacaaaactagaagaaagatcaagggtgaagtgtgaccagtattggcctagcagaggcacagaaacccacggactcgttcaagtaacgctgcttgatactgtggagctggccacatattgtgttcgaacatttgcactttacaagaatggttcaagtgagaagagagaagtgagacaattccagttcaccgcctggcctgatcatggtgttccagaacaccctacaccttttctagctttcttacgtagagtcaaaacctgtaaccctcccgatgctggtccgatggttgtgcactgcagtgcgggagttggccggactggttgcttcatcgtcatagatgccatgttagaaagaataaagcatgaaaaaactgtagatatttatggccatgtaactttaatgagagcccagaggaactatatggttcaaacagaagaccaatacatctttatccatgatgcactgttagaagcagtgacttgtggaaataccgaagtgccagctagaaacttgtatgcctacattcagaagctgacacaaatagaaacgggagagaatgtcacaggaatggagctcgaatttaagcgtctagccagctcaaaagctcacacctcaaggtttatcagtgccaatcttccatgtaataaattcaaaaatcgccttgttaatattatgccatatgaatccacaagggtatgcctgcagcctatccgtggagtagaaggatctgattacatcaatgccagttttattgatggatacagacaacagaaagcctacatcgctacccaggggcccttggcagagaccactgaagacttctggcggatgctctgggaacacaattccaccatagttgtgatgctcaccaagctgcgtgaaatgggcagagagaaatgtcaccaatactggccagcagaacggtctgcaagataccagtactttgttgtagatcccatggctgagtacaacatgccacagtatatcctaagggaattcaaggtcacagatgccagggacggccagtcccgaacagtaaggcagttccagttcactgactggccagagcaaggagtgccaaagtccggagaaggatttattgacttcatcggccaagtccataaaacaaaagaacagtttggccaagatggacccatttcagtccattgcagcgcgggcgttggaagaactggagtcttcataacgctaagcattgttttggaaagaatgagatatgaaggagttgtagatatcttccagactgtcaaaatgttaagaacacaacgaccagctatggtacagacagaggatcaatatcagttttcctatcgtgccgcactagagtacctgggcagctttgaccactatgcaacgtagaaacccctgacccattctggatttttactacaggcccttcaatatccatggagtctcttctgagccatacagggcacttgagaagtccttcttaacttctagctaacaactacttagtgggactattacacacaaaacaaattaaaaacaaattattccaggtggaccaagaattcacagtttaataatctaacctgaaaaataatgaagagaatcctgactgatgaggcatctgaaggattttatttacagatacctcaaggattcaaaatcaagggaagaagaaatcacagcaaagaaccaccatcttattcaggattgcttgaaaggtgcaaggagaaattgccagaatgctgcagttcagcacaagatatgtgctggtgtggcttctcacaatgaaacggactctgctttgacatcgccccttcccaccatactgctcataataacattttagggggaaaggggagggaatgtttaaaaagaaagtccttgatttagttttttagtattgtaaagatactgctgacctgtgcttcatttctaactgtgtaaacttttttttaacaaaatgtatcattcgataaagtgaattttaaaaaagttacataactcttcatttttttatttccaaatcgtaggtttttttaagctgtagaactgttatctgtaatatcttgctgtagaaatatcaaatcatttgaaaatttgcacatttttgtgcaaaactcaatctacagtatcagtctcgtcagatatattaattttacacttcagttttgattggtgagaaagtacccattctcttcaaataatcaaagataattattattttgttttgtttttggaatcaacagggaggcgcaaagtataaagttgctgctaacatatatacatatatatccatattttataagggtgtctatgtatatatagacagtgtgtccacacaaaaaatagatacagttatcagtcagtcagttcttccatgatttagtttttttaaacgtagaaaagctattgtaaacatctctttccatttattcttaattttttgacatattggtatttctttaaagggaaatgaggaatgcacatcagtgattgattgtcaaacctcaccccctgatttcctacctaatctacccccacctaaccaatcaatcacatccacaaattgttttgtttgtttgttagtcaggcttccaacaaagttcaatatttctaacactctagtgcaataaaaattattattaaatagctaagaggtgtgcatgtgggaaaggtcagtgcatatccctttaggaggggagaatgttgtaatatatcagctatcgagttgtttaaaaaaagtgtattcaatcgtatattgtctatagtatgtgctatgaaatttgcatttatgatatgtaacaggggcaaagccaaattcatgttactctgttcagtcagaaacattttgtggcatacagcattcctgggaagtgctgtactttgtttcgttttggttttagttttgcatttagagtgccttataattgatgcctattttaatagcatttctttttagcttttggttcgtatttccattcactgttcgtatctgttactttctattaaagcattatctgtttaccacatgtacaaaaactctttgaataatatgcattcctagttttcagccaagtcggggatgttagtgattgtaccagcccaaagcacttggataatcagggcccttcttccttttataatcaatcatcaacatcagaaaaagctacttgttttatttatattcccttccaaatccgctctggaacatgcagtaactgcaccaaacttattttagtaacaaatatcattggcaactttggaatatatttgatattccattaggatttttctaaaaggggaaataaactatatatatatatgtatcttacccccaattcttccaacagaatttctataggaagccatggatgatggcataagtttgccacatattacatgattttaaataatcctcaaaatacccaaggaactcttaaagagttttggtatgagtatactactttggtttaattttagcttcatggatgttctgcatggaaggatttttgttttccacattttcccattgctagcagagtgaaatccaagagaccaaacatttgcaagcattgtatttgagcacttttgtaaaaaacaaagaaaaagaaaaaaaagaaaatatatataatactaaaaaaaagtatctagaaggctacctcagaatgagactctctaacctacatcagaaccagagaagaatgtgcactatgtgggtctgttatcattattttcttttagtttgtatctttttggagatttatccaagtgccagattactcagtgctataattttcttttagttaaacaaagggggtcagacagacattgcatcatccagacatgccttgttggacatgtagaatccgatggagcactgcacaccagaatgattggccaatgagcagcttctctccctgaaacaataactgcccatttggcaaagggaaagatgacaataatcagaagaagaaaatgaatgggatgcataccatagacgaacgaggcggagactattgcgggaatcttactgttcaggagctgttcctagaactaactcccttactgtcattgatgtgcattccactctgtgcttttctgtacaaccattcaagttttaatttcccaggtgaaccatctttatctgccattaccacaagctttcaagtttccagttattttcatcatcataaccagtacggtgctattatttacctatgtacgtgtagttatgtataattttgtaattagttacaatggtaaaaaaaatcaaaatatataaaaagtgatttgtacagaactttattttagctcttttttaaaaatgatttgcatggttagaaaacggcgaggacagccaggggagggaagggcctctagggaactttgcactttctatacctttgtactatgcactgccctattgattctacacccaataatgatattacttgaacccatctgtaagaaactgcttcggaaattcatttgtgtgtatgtaaataacacaacatagaaacaggaagggaaaaaagtctgcagtaatgcacgtattttttttctttcctgtttattttcggttttgctttaagtccttttatttttaattccctttttgtttttctttttgggttttggttccttttgggtttatgggtgccctgatactccagcagagatcagaaggctacagatccattctatccatccgttatgtggctttgccatcccagcttggagtgtctttacaaagataataacagttgtgttctttgctctcgttttggatgcatagactgaaaaattaaaacaaataacttgtaaaatggcttgttaaaaaatacaattacctctaattagtagtacgcgtaaatgttttacagaatgaaaggcgtgctttttattttcttacttcgttacattggtggcgaaagaagtctgtatgaaaatcagttctttgctgacacaagttccatttgttacaaatgaattctaataaaaatgtcagtgttatgca

SEQ ID NO: 1857 - DNA, 10039 bp, Homo sapiens
gcagtttattctgggcctgtgtggaatagaaagacaattctttatttgactggtaggaaagaaaagagaagactcctcagggtttccaaggaggactggagcggctgctttagtgaagaagtgaagaatcaaggaagtaaaggacctgtctcaaagtcacacaactaggaaatcttgaggagtctgatacttttcatcctccagctataaaatcatcttgtagggggaagctgtacattggtggaaaataaaaggcaagcagttcctggcccgtgatattccagttagaggtgtctgactgacagcatgttggcaccgagggaagcgatgggcttcggctccaggtttctgtcctgagaccacagcagaatgtgccttggacaaaggcttggactccttgatcttctggtaacttcaaaaatctggtctcagggtggtgaactttttcttcgaattcctaacctgtgagcttacgatgatggtgcctgtccattaactgaacaactgtggttttgaacttcttgaggccagggactgtgtctgaaaacaccgacggtggctaactcaagggagacgtctggtgaacacccgtgggatctaaagaacaagctctgaaagtgttccagctgaaatttcagatcggacagactcgctgcggctccggaggcagtgattccaagctgctcgcgcacgctgctgccaagctgcaggatggtgcacgtagccaggctgctgctgctgctcctcactttcttcctccgcacggatgctgagacacctccaaggtttacacgaacacccgttgatcagacaggggtctctggcggagttgcctctttcatctgccaagctacgggagacccaagacctaaaattgtctggaacaaaaaaggaaagaaagtcagcaatcagagatttgaggtaatagagtttgacgatgggtctggatcagttctcagaatacaacccttacggactccgagggatgaggccatttatgaatgtgtggcctcaaataatgtgggagaaataagtgtatccaccagactcacagttttgcgggaagatcaaattcccaggggcttccctaccattgacatgggcccacagttgaaggtggttgagcgtactcgcacggccaccatgctttgtgcagccagtggtaatccggatccagaaatcacttggtttaaagatttcttacctgtggacacaagcaacaacaatggtcgtattaagcagttacgatcaggagcccttcagattgagcagagtgaagagtctgaccaaggaaaatatgagtgtgttgccaccaacagcgcgggcactcgctattccgctcctgccaatttatatgtcagagttcgccgtgtcccaccaagattctctatcccacccactaatcatgaaatcatgccaggcggaagcgttaatatcacctgtgtggccgtggggtcaccaatgccttatgtaaagtggatgttgggggcagaagatctgacacctgaagatgatatgccaataggaagaaatgtgctagaactgaatgatgtaagacagtcagcaaattacacctgtgttgctatgtcaacactgggtgtcattgaagcaatagcacagatcactgtcaaagccttacccaaacctccaggaactcctgtagtgaccgagagcacagctacaagcatcacactgacgtgggactctgggaaccctgagcctgtttcttattacataattcagcataaacctaaaaactctgaggaactttacaaagaaattgatggggtggcgaccacacgctacagtgtcgctggactaagtccctactcggattatgaattcagggttgttgctgtcaataacattgggcgggggcctcccagcgaacctgtgctaacacaaacctcagagcaagcaccatccagtgccccgagggatgtccaggcacgaatgttgagttcgaccaccattttggtacagtggaaggaacctgaagagccaaatggacagatccaaggatatagagtttattatacaatggatcccactcaacatgtcaacaactggatgaaacacaatgtagctgacagccaaatcactactattggcaacttagtgccccagaaaacatattctgtcaaagtcctggcttttacctcaattggagatggtcccctttcaagtgacatacaagtcatcactcagacaggagtaccagggcagccactaaacttcaaagcagaacctgagtctgaaacaagtattttgctctcttggacacctccacgttcagataccattgccaactatgaactggtctacaaagatggggagcatggagaggagcaacgaattaccattgagccagggacatcatataggctgcaaggactgaaaccaaacagcttatactatttccgtctggctgcacgctcccctcaaggcctgggtgcttctactgcagaaatatcagctagaaccatgcagtcaaagccgtcagctcctcctcaagacattagttgcaccagcccaagttccactagtattttggtaagttggcaacctccaccagtggaaaaacagaatggcattatcactgaatactccatcaagtacactgcagtggatggggaagatgacaagcctcacgagattttgggaattccttcggacactaccaaataccttttggaacagctggaaaaatggactgaataccggatcactgtgacagcccatacagatgtcggccctggccctgagagcttgtccgtgttgattcgaaccaatgaagatgttcctagtggtcctcctcgcaaagtcgaggtagaggctgtcaactcaacatctgttaaagtctcatggcgctcacccgtgcccaataaacagcatggccagataagaggatatcaggtgcattatgtgaggatggaaaatggtgagcccaagggccagcccatgctgaaagatgtcatgctggctgatgcacagtgggaatttgatgatactactgaacatgacatgatcatttctgggctccagcctgaaacttcctactccctcaccgtcacagcctacacaaccaaaggagatggtgctcgcagcaagcccaaactggtgtccaccactggggcagttccagggaaacctcggcttgtgattaaccacactcagatgaatactgctcttattcagtggcaccctccggtggacacatttggacctcttcagggctaccgtctaaaatttggccgcaaggatatggagccacttactactcttgagttctctgaaaaagaagatcactttacagctacagacatccacaagggagcatcatacgtcttcaggctctcagccagaaacaaagtgggctttggggaggagatggtgaaggagatttccattccagaagaagtaccaactggattccctcaaaaccttcactcagaaggcaccacttcaacctccgtccagttatcttggcaaccacctgtcctggcagagagaaatggcattatcaccaagtatacccttctttatagggatatcaacatcccccttctcccgatggagcagcttattgttccagctgacaccactatgacactcactggcttaaaaccagataccacatacgatgtaaaagtacgtgctcatacgagcaaagggcccgggccatatagtcccagtgtccagttcaggacactgcctgtggatcaagtgtttgcaaaaaattttcatgtcaaagcagtaatgaagacttccgtgttgctgtcttgggagattccagagaattataactccgccatgcctttcaaaattctttatgatgatgggaaaatggtagaagaagtggatggccgagccacacagaagttaattgtcaacctgaagcctgagaaatcatattcatttgtgctgacaaatcgtggaaacagtgctggtgggctgcagcacagggtcacggcaaagactgcaccagatgtattacgtaccaagcctgccttcattgggaagaccaacttggatggcatgattactgtgcaactgcctgaagtacctgcaaatgagaatataaaaggttactacataataattgtgcctttgaagaaatctcgcgggaaatttatcaagccatgggagagtccagatgaaatggaattagatgagctgcttaaggagatatctaggaagcgcagaagcatccgttatgggagagaagttgaattaaagccatatattgccgctcactttgatgtccttcccactgagttcaccctgggggatgacaagcattatggtggatttacaaacaagcaactccaaagtggtcaagaatatgtcttctttgtgttagcagtaatggaacatgcagagtctaagatgtatgcaaccagcccttactccgaccccgtggtgtcaatggatctggatccgcagccaatcacggatgaagaagaaggcttgatctgggttgtaggtcctgtccttgcagtggtctttatcatctgcattgtcattgctattcttctttataaaaggaagagggcagagtccgactctagaaaaagcagcataccgaacaataaggagatcccttcacaccacccaacagaccctgtagaactgaggcgccttaactttcaaacaccgggtatggctagccatcctccaatacccatcttggaacttgcagaccacattgaaagattgaaagcaaatgacaacttgaagttttcccaggaatatgagtcaattgaccctggccagcagttcacttgggaacattcaaacttggaagtaaacaaaccaaagaatagatacgcgaatgtaatcgcatatgatcattcccgggttctcctatcagctatagaagggatcccaggaagtgactatgtgaatgccaactacatagatgggtataggaagcaaaatgcctatattgcaacacagggatctctccccgaaacatttggggacttttggagaatgatatgggaacaacggagtgccacagttgtcatgatgacaaaactagaagaaagatcaagggtgaagtgtgaccagtattggcctagcagaggcacagaaacccacggactcgttcaagtaacgctgcttgatactgtggagctggccacatattgtgttcgaacatttgcactttacaagaatggttcaagtgagaagagagaagtgagacaattccagttcaccgcctggcctgatcatggtgttccagaacaccctacaccttttctagctttcttacgtagagtcaaaacctgtaaccctcccgatgctggtccgatggttgtgcactgcagtgcgggagttggccggactggttgcttcatcgtcatagatgccatgttagaaagaataaagcatgaaaaaactgtagatatttatggccatgtaactttaatgagagcccagaggaactatatggttcaaacagaagaccaatacatctttatccatgatgcactgttagaagcagtgacttgtggaaataccgaagtgccagctagaaacttgtatgcctacattcagaagctgacacaaatagaaacgggagagaatgtcacaggaatggagctcgaatttaagcgtctagccagctcaaaagctcacacctcaaggtttatcagtgccaatcttccatgtaataaattcaaaaatcgccttgttaatattatgccatatgaatccacaagggtatgcctgcagcctatccgtggagtagaaggatctgattacatcaatgccagttttattgatggatacagacaacagaaagcctacatcgctacccaggggcccttggcagagaccactgaagacttctggcggatgctctgggaacacaattccaccatagttgtgatgctcaccaagctgcgtgaaatgggcagagagaaatgtcaccaatactggccagcagaacggtctgcaagataccagtactttgttgtagatcccatggctgagtacaacatgccacagtatatcctaagggaattcaaggtcacagatgccagggacggccagtcccgaacagtaaggcagttccagttcactgactggccagagcaaggagtgccaaagtccggagaaggatttattgacttcatcggccaagtccataaaacaaaagaacagtttggccaagatggacccatttcagtccattgcagcgcgggcgttggaagaactggagtcttcataacgctaagcattgttttggaaagaatgagatatgaaggagttgtagatatcttccagactgtcaaaatgttaagaacacaacgaccagctatggtacagacagaggatcaatatcagttttcctatcgtgccgcactagagtacctgggcagctttgaccactatgcaacgtagaaacccctgacccattctggatttttactacaggcccttcaatatccatggagtctcttctgagccatacagggcacttgagaagtccttcttaacttctagctaacaactacttagtgggactattacacacaaaacaaattaaaaacaaattattccaggtggaccaagaattcacagtttaataatctaacctgaaaaataatgaagagaatcctgactgatgaggcatctgaaggattttatttacagatacctcaaggattcaaaatcaagggaagaagaaatcacagcaaagaaccaccatcttattcaggattgcttgaaaggtgcaaggagaaattgccagaatgctgcagttcagcacaagatatgtgctggtgtggcttctcacaatgaaacggactctgctttgacatcgccccttcccaccatactgctcataataacattttagggggaaaggggagggaatgtttaaaaagaaagtccttgatttagttttttagtattgtaaagatactgctgacctgtgcttcatttctaactgtgtaaacttttttttaacaaaatgtatcattcgataaagtgaattttaaaaaagttacataactcttcatttttttatttccaaatcgtaggtttttttaagctgtagaactgttatctgtaatatcttgctgtagaaatatcaaatcatttgaaaatttgcacatttttgtgcaaaactcaatctacagtatcagtctcgtcagatatattaattttacacttcagttttgattggtgagaaagtacccattctcttcaaataatcaaagataattattattttgttttgtttttggaatcaacagggaggcgcaaagtataaagttgctgctaacatatatacatatatatccatattttataagggtgtctatgtatatatagacagtgtgtccacacaaaaaatagatacagttatcagtcagtcagttcttccatgatttagtttttttaaacgtagaaaagctattgtaaacatctctttccatttattcttaattttttgacatattggtatttctttaaagggaaatgaggaatgcacatcagtgattgattgtcaaacctcaccccctgatttcctacctaatctacccccacctaaccaatcaatcacatccacaaattgttttgtttgtttgttagtcaggcttccaacaaagttcaatatttctaacactctagtgcaataaaaattattattaaatagctaagaggtgtgcatgtgggaaaggtcagtgcatatccctttaggaggggagaatgttgtaatatatcagctatcgagttgtttaaaaaaagtgtattcaatcgtatattgtctatagtatgtgctatgaaatttgcatttatgatatgtaacaggggcaaagccaaattcatgttactctgttcagtcagaaacattttgtggcatacagcattcctgggaagtgctgtactttgtttcgttttggttttagttttgcatttagagtgccttataattgatgcctattttaatagcatttctttttagcttttggttcgtatttccattcactgttcgtatctgttactttctattaaagcattatctgtttaccacatgtacaaaaactctttgaataatatgcattcctagttttcagccaagtcggggatgttagtgattgtaccagcccaaagcacttggataatcagggcccttcttccttttataatcaatcatcaacatcagaaaaagctacttgttttatttatattcccttccaaatccgctctggaacatgcagtaactgcaccaaacttattttagtaacaaatatcattggcaactttggaatatatttgatattccattaggatttttctaaaaggggaaataaactatatatatatatgtatcttacccccaattcttccaacagaatttctataggaagccatggatgatggcataagtttgccacatattacatgattttaaataatcctcaaaatacccaaggaactcttaaagagttttggtatgagtatactactttggtttaattttagcttcatggatgttctgcatggaaggatttttgttttccacattttcccattgctagcagagtgaaatccaagagaccaaacatttgcaagcattgtatttgagcacttttgtaaaaaacaaagaaaaagaaaaaaaagaaaatatatataatactaaaaaaaagtatctagaaggctacctcagaatgagactctctaacctacatcagaaccagagaagaatgtgcactatgtgggtctgttatcattattttcttttagtttgtatctttttggagatttatccaagtgccagattactcagtgctataattttcttttagttaaacaaagggggtcagacagacattgcatcatccagacatgccttgttggacatgtagaatccgatggagcactgcacaccagaatgattggccaatgagcagcttctctccctgaaacaataactgcccatttggcaaagggaaagatgacaataatcagaagaagaaaatgaatgggatgcataccatagacgaacgaggcggagactattgcgggaatcttactgttcaggagctgttcctagaactaactcccttactgtcattgatgtgcattccactctgtgcttttctgtacaaccattcaagttttaatttcccaggtgaaccatctttatctgccattaccacaagctttcaagtttccagttattttcatcatcataaccagtacggtgctattatttacctatgtacgtgtagttatgtataattttgtaattagttacaatggtaaaaaaaatcaaaatatataaaaagtgatttgtacagaactttattttagctcttttttaaaaatgatttgcatggttagaaaacggcgaggacagccaggggagggaagggcctctagggaactttgcactttctatacctttgtactatgcactgccctattgattctacacccaataatgatattacttgaacccatctgtaagaaactgcttcggaaattcatttgtgtgtatgtaaataacacaacatagaaacaggaagggaaaaaagtctgcagtaatgcacgtattttttttctttcctgtttattttcggttttgctttaagtccttttatttttaattccctttttgtttttctttttgggttttggttccttttgggtttatgggtgccctgatactccagcagagatcagaaggctacagatccattctatccatccgttatgtggctttgccatcccagcttggagtgtctttacaaagataataacagttgtgttctttgctctcgttttggatgcatagactgaaaaattaaaacaaataacttgtaaaatggcttgttaaaaaatacaattacctctaattagtagtacgcgtaaatgttttacagaatgaaaggcgtgctttttattttcttacttcgttacattggtggcgaaagaagtctgtatgaaaatcagttctttgctgacacaagttccatttgttacaaatgaattctaataaaaatgtcagtgttatgca

SEQ ID NO: 1858 - DNA, 10078 bp, Homo sapiens
gcagtttattctgggcctgtgtggaatagaaagacaattctttatttgactggtaggaaagaaaagagaagactcctcagggtttccaaggaggactggagcggctgctttagtgaagaagtgaagaatcaaggaagtaaaggacctgtctcaaagtcacacaactaggaaatcttgaggagtctgatacttttcatcctccagctataaaatcatcttgtagggggaagctgtacattggtggaaaataaaaggcaagcagttcctggcccgtgatattccagttagaggtgtctgactgacagcatgttggcaccgagggaagcgatgggcttcggctccaggtttctgtcctgagaccacagcagaatgtgccttggacaaaggcttggactccttgatcttctggtaacttcaaaaatctggtctcagggtggtgaactttttcttcgaattcctaacctgtgagcttacgatgatggtgcctgtccattaactgaacaactgtggttttgaacttcttgaggccagggactgtgtctgaaaacaccgacggtggctaactcaagggagacgtctggtgaacacccgtgggatctaaagaacaagctctgaaagtgttccagctgaaatttcagatcggacagactcgctgcggctccggaggcagtgattccaagctgctcgcgcacgctgctgccaagctgcaggatggtgcacgtagccaggctgctgctgctgctcctcactttcttcctccgcacggatgctgagacacctccaaggtttacacgaacacccgttgatcagacaggggtctctggcggagttgcctctttcatctgccaagctacgggagacccaagacctaaaattgtctggaacaaaaaaggaaagaaagtcagcaatcagagatttgaggtaatagagtttgacgatgggtctggatcagttctcagaatacaacccttacggactccgagggatgaggccatttatgaatgtgtggcctcaaataatgtgggagaaataagtgtatccaccagactcacagttttgcgggaagatcaaattcccaggggcttccctaccattgacatgggcccacagttgaaggtggttgagcgtactcgcacggccaccatgctttgtgcagccagtggtaatccggatccagaaatcacttggtttaaagatttcttacctgtggacacaagcaacaacaatggtcgtattaagcagttacgatcagaatctattggtggtacaccaataagaggagcccttcagattgagcagagtgaagagtctgaccaaggaaaatatgagtgtgttgccaccaacagcgcgggcactcgctattccgctcctgccaatttatatgtcagagagctgcgagaagttcgccgtgtcccaccaagattctctatcccacccactaatcatgaaatcatgccaggcggaagcgttaatatcacctgtgtggccgtggggtcaccaatgccttatgtaaagtggatgttgggggcagaagatctgacacctgaagatgatatgccaataggaagaaatgtgctagaactgaatgatgtaagacagtcagcaaattacacctgtgttgctatgtcaacactgggtgtcattgaagcaatagcacagatcactgtcaaagccttacccaaacctccaggaactcctgtagtgaccgagagcacagctacaagcatcacactgacgtgggactctgggaaccctgagcctgtttcttattacataattcagcataaacctaaaaactctgaggaactttacaaagaaattgatggggtggcgaccacacgctacagtgtcgctggactaagtccctactcggattatgaattcagggttgttgctgtcaataacattgggcgggggcctcccagcgaacctgtgctaacacaaacctcagagcaagcaccatccagtgccccgagggatgtccaggcacgaatgttgagttcgaccaccattttggtacagtggaaggaacctgaagagccaaatggacagatccaaggatatagagtttattatacaatggatcccactcaacatgtcaacaactggatgaaacacaatgtagctgacagccaaatcactactattggcaacttagtgccccagaaaacatattctgtcaaagtcctggcttttacctcaattggagatggtcccctttcaagtgacatacaagtcatcactcagacaggagtaccagggcagccactaaacttcaaagcagaacctgagtctgaaacaagtattttgctctcttggacacctccacgttcagataccattgccaactatgaactggtctacaaagatggggagcatggagaggagcaacgaattaccattgagccagggacatcatataggctgcaaggactgaaaccaaacagcttatactatttccgtctggctgcacgctcccctcaaggcctgggtgcttctactgcagaaatatcagctagaaccatgcagtcaaagccgtcagctcctcctcaagacattagttgcaccagcccaagttccactagtattttggtaagttggcaacctccaccagtggaaaaacagaatggcattatcactgaatactccatcaagtacactgcagtggatggggaagatgacaagcctcacgagattttgggaattccttcggacactaccaaataccttttggaacagctggaaaaatggactgaataccggatcactgtgacagcccatacagatgtcggccctggccctgagagcttgtccgtgttgattcgaaccaatgaagatgttcctagtggtcctcctcgcaaagtcgaggtagaggctgtcaactcaacatctgttaaagtctcatggcgctcacccgtgcccaataaacagcatggccagataagaggatatcaggtgcattatgtgaggatggaaaatggtgagcccaagggccagcccatgctgaaagatgtcatgctggctgatgcacagtgggaatttgatgatactactgaacatgacatgatcatttctgggctccagcctgaaacttcctactccctcaccgtcacagcctacacaaccaaaggagatggtgctcgcagcaagcccaaactggtgtccaccactggggcagttccagggaaacctcggcttgtgattaaccacactcagatgaatactgctcttattcagtggcaccctccggtggacacatttggacctcttcagggctaccgtctaaaatttggccgcaaggatatggagccacttactactcttgagttctctgaaaaagaagatcactttacagctacagacatccacaagggagcatcatacgtcttcaggctctcagccagaaacaaagtgggctttggggaggagatggtgaaggagatttccattccagaagaagtaccaactggattccctcaaaaccttcactcagaaggcaccacttcaacctccgtccagttatcttggcaaccacctgtcctggcagagagaaatggcattatcaccaagtatacccttctttatagggatatcaacatcccccttctcccgatggagcagcttattgttccagctgacaccactatgacactcactggcttaaaaccagataccacatacgatgtaaaagtacgtgctcatacgagcaaagggcccgggccatatagtcccagtgtccagttcaggacactgcctgtggatcaagtgtttgcaaaaaattttcatgtcaaagcagtaatgaagacttccgtgttgctgtcttgggagattccagagaattataactccgccatgcctttcaaaattctttatgatgatgggaaaatggtagaagaagtggatggccgagccacacagaagttaattgtcaacctgaagcctgagaaatcatattcatttgtgctgacaaatcgtggaaacagtgctggtgggctgcagcacagggtcacggcaaagactgcaccagatgtattacgtaccaagcctgccttcattgggaagaccaacttggatggcatgattactgtgcaactgcctgaagtacctgcaaatgagaatataaaaggttactacataataattgtgcctttgaagaaatctcgcgggaaatttatcaagccatgggagagtccagatgaaatggaattagatgagctgcttaaggagatatctaggaagcgcagaagcatccgttatgggagagaagttgaattaaagccatatattgccgctcactttgatgtccttcccactgagttcaccctgggggatgacaagcattatggtggatttacaaacaagcaactccaaagtggtcaagaatatgtcttctttgtgttagcagtaatggaacatgcagagtctaagatgtatgcaaccagcccttactccgaccccgtggtgtcaatggatctggatccgcagccaatcacggatgaagaagaaggcttgatctgggttgtaggtcctgtccttgcagtggtctttatcatctgcattgtcattgctattcttctttataaaaggaagagggcagagtccgactctagaaaaagcagcataccgaacaataaggagatcccttcacaccacccaacagaccctgtagaactgaggcgccttaactttcaaacaccgggtatggctagccatcctccaatacccatcttggaacttgcagaccacattgaaagattgaaagcaaatgacaacttgaagttttcccaggaatatgagtcaattgaccctggccagcagttcacttgggaacattcaaacttggaagtaaacaaaccaaagaatagatacgcgaatgtaatcgcatatgatcattcccgggttctcctatcagctatagaagggatcccaggaagtgactatgtgaatgccaactacatagatgggtataggaagcaaaatgcctatattgcaacacagggatctctccccgaaacatttggggacttttggagaatgatatgggaacaacggagtgccacagttgtcatgatgacaaaactagaagaaagatcaagggtgaagtgtgaccagtattggcctagcagaggcacagaaacccacggactcgttcaagtaacgctgcttgatactgtggagctggccacatattgtgttcgaacatttgcactttacaagaatggttcaagtgagaagagagaagtgagacaattccagttcaccgcctggcctgatcatggtgttccagaacaccctacaccttttctagctttcttacgtagagtcaaaacctgtaaccctcccgatgctggtccgatggttgtgcactgcagtgcgggagttggccggactggttgcttcatcgtcatagatgccatgttagaaagaataaagcatgaaaaaactgtagatatttatggccatgtaactttaatgagagcccagaggaactatatggttcaaacagaagaccaatacatctttatccatgatgcactgttagaagcagtgacttgtggaaataccgaagtgccagctagaaacttgtatgcctacattcagaagctgacacaaatagaaacgggagagaatgtcacaggaatggagctcgaatttaagcgtctagccagctcaaaagctcacacctcaaggtttatcagtgccaatcttccatgtaataaattcaaaaatcgccttgttaatattatgccatatgaatccacaagggtatgcctgcagcctatccgtggagtagaaggatctgattacatcaatgccagttttattgatggatacagacaacagaaagcctacatcgctacccaggggcccttggcagagaccactgaagacttctggcggatgctctgggaacacaattccaccatagttgtgatgctcaccaagctgcgtgaaatgggcagagagaaatgtcaccaatactggccagcagaacggtctgcaagataccagtactttgttgtagatcccatggctgagtacaacatgccacagtatatcctaagggaattcaaggtcacagatgccagggacggccagtcccgaacagtaaggcagttccagttcactgactggccagagcaaggagtgccaaagtccggagaaggatttattgacttcatcggccaagtccataaaacaaaagaacagtttggccaagatggacccatttcagtccattgcagcgcgggcgttggaagaactggagtcttcataacgctaagcattgttttggaaagaatgagatatgaaggagttgtagatatcttccagactgtcaaaatgttaagaacacaacgaccagctatggtacagacagaggatcaatatcagttttcctatcgtgccgcactagagtacctgggcagctttgaccactatgcaacgtagaaacccctgacccattctggatttttactacaggcccttcaatatccatggagtctcttctgagccatacagggcacttgagaagtccttcttaacttctagctaacaactacttagtgggactattacacacaaaacaaattaaaaacaaattattccaggtggaccaagaattcacagtttaataatctaacctgaaaaataatgaagagaatcctgactgatgaggcatctgaaggattttatttacagatacctcaaggattcaaaatcaagggaagaagaaatcacagcaaagaaccaccatcttattcaggattgcttgaaaggtgcaaggagaaattgccagaatgctgcagttcagcacaagatatgtgctggtgtggcttctcacaatgaaacggactctgctttgacatcgccccttcccaccatactgctcataataacattttagggggaaaggggagggaatgtttaaaaagaaagtccttgatttagttttttagtattgtaaagatactgctgacctgtgcttcatttctaactgtgtaaacttttttttaacaaaatgtatcattcgataaagtgaattttaaaaaagttacataactcttcatttttttatttccaaatcgtaggtttttttaagctgtagaactgttatctgtaatatcttgctgtagaaatatcaaatcatttgaaaatttgcacatttttgtgcaaaactcaatctacagtatcagtctcgtcagatatattaattttacacttcagttttgattggtgagaaagtacccattctcttcaaataatcaaagataattattattttgttttgtttttggaatcaacagggaggcgcaaagtataaagttgctgctaacatatatacatatatatccatattttataagggtgtctatgtatatatagacagtgtgtccacacaaaaaatagatacagttatcagtcagtcagttcttccatgatttagtttttttaaacgtagaaaagctattgtaaacatctctttccatttattcttaattttttgacatattggtatttctttaaagggaaatgaggaatgcacatcagtgattgattgtcaaacctcaccccctgatttcctacctaatctacccccacctaaccaatcaatcacatccacaaattgttttgtttgtttgttagtcaggcttccaacaaagttcaatatttctaacactctagtgcaataaaaattattattaaatagctaagaggtgtgcatgtgggaaaggtcagtgcatatccctttaggaggggagaatgttgtaatatatcagctatcgagttgtttaaaaaaagtgtattcaatcgtatattgtctatagtatgtgctatgaaatttgcatttatgatatgtaacaggggcaaagccaaattcatgttactctgttcagtcagaaacattttgtggcatacagcattcctgggaagtgctgtactttgtttcgttttggttttagttttgcatttagagtgccttataattgatgcctattttaatagcatttctttttagcttttggttcgtatttccattcactgttcgtatctgttactttctattaaagcattatctgtttaccacatgtacaaaaactctttgaataatatgcattcctagttttcagccaagtcggggatgttagtgattgtaccagcccaaagcacttggataatcagggcccttcttccttttataatcaatcatcaacatcagaaaaagctacttgttttatttatattcccttccaaatccgctctggaacatgcagtaactgcaccaaacttattttagtaacaaatatcattggcaactttggaatatatttgatattccattaggatttttctaaaaggggaaataaactatatatatatatgtatcttacccccaattcttccaacagaatttctataggaagccatggatgatggcataagtttgccacatattacatgattttaaataatcctcaaaatacccaaggaactcttaaagagttttggtatgagtatactactttggtttaattttagcttcatggatgttctgcatggaaggatttttgttttccacattttcccattgctagcagagtgaaatccaagagaccaaacatttgcaagcattgtatttgagcacttttgtaaaaaacaaagaaaaagaaaaaaaagaaaatatatataatactaaaaaaaagtatctagaaggctacctcagaatgagactctctaacctacatcagaaccagagaagaatgtgcactatgtgggtctgttatcattattttcttttagtttgtatctttttggagatttatccaagtgccagattactcagtgctataattttcttttagttaaacaaagggggtcagacagacattgcatcatccagacatgccttgttggacatgtagaatccgatggagcactgcacaccagaatgattggccaatgagcagcttctctccctgaaacaataactgcccatttggcaaagggaaagatgacaataatcagaagaagaaaatgaatgggatgcataccatagacgaacgaggcggagactattgcgggaatcttactgttcaggagctgttcctagaactaactcccttactgtcattgatgtgcattccactctgtgcttttctgtacaaccattcaagttttaatttcccaggtgaaccatctttatctgccattaccacaagctttcaagtttccagttattttcatcatcataaccagtacggtgctattatttacctatgtacgtgtagttatgtataattttgtaattagttacaatggtaaaaaaaatcaaaatatataaaaagtgatttgtacagaactttattttagctcttttttaaaaatgatttgcatggttagaaaacggcgaggacagccaggggagggaagggcctctagggaactttgcactttctatacctttgtactatgcactgccctattgattctacacccaataatgatattacttgaacccatctgtaagaaactgcttcggaaattcatttgtgtgtatgtaaataacacaacatagaaacaggaagggaaaaaagtctgcagtaatgcacgtattttttttctttcctgtttattttcggttttgctttaagtccttttatttttaattccctttttgtttttctttttgggttttggttccttttgggtttatgggtgccctgatactccagcagagatcagaaggctacagatccattctatccatccgttatgtggctttgccatcccagcttggagtgtctttacaaagataataacagttgtgttctttgctctcgttttggatgcatagactgaaaaattaaaacaaataacttgtaaaatggcttgttaaaaaatacaattacctctaattagtagtacgcgtaaatgttttacagaatgaaaggcgtgctttttattttcttacttcgttacattggtggcgaaagaagtctgtatgaaaatcagttctttgctgacacaagttccatttgttacaaatgaattctaataaaaatgtcagtgttatgca

SEQ ID NO: 1859 - DNA, 8845 bp, Homo sapiens
gcagtttattctgggcctgtgtggaatagaaagacaattctttatttgactggtaggaaagaaaagagaagactcctcagggtttccaaggaggactggagcggctgctttagtgaagaagtgaagaatcaaggaagtaaaggacctgtctcaaagtcacacaactaggaaatcttgaggagtctgatacttttcatcctccagctataaaatcatcttgtagggggaagctgtacattggtggaaaataaaaggcaagcagttcctggcccgtgatattccagttagaggtgtctgactgacagcatgttggcaccgagggaagcgatgggcttcggctccaggtttctgtcctgagaccacagcagaatgtgccttggacaaaggcttggactccttgatcttctggtaacttcaaaaatctggtctcagggtggtgaactttttcttcgaattcctaacctgtgagcttacgatgatggtgcctgtccattaactgaacaactgtggttttgaacttcttgaggccagggactgtgtctgaaaacaccgacggtggctaactcaagggagacgtctggtgaacacccgtgggatctaaagaacaagctctgaaagtgttccagctgaaatttcagatcggacagactcgctgcggctccggaggcagtgattccaagctgctcgcgcacgctgctgccaagctgcaggatggtgcacgtagccaggctgctgctgctgctcctcactttcttcctccgcacggatgctgagacacctccaaggtttacacgaacacccgttgatcagacaggggtctctggcggagttgcctctttcatctgccaagctacgggagacccaagacctaaaattgtctggaacaaaaaaggaaagaaagtcagcaatcagagatttgaggtaatagagtttgacgatgggtctggatcagttctcagaatacaacccttacggactccgagggatgaggccatttatgaatgtgtggcctcaaataatgtgggagaaataagtgtatccaccagactcacagttttgcgggaagatcaaattcccaggggcttccctaccattgacatgggcccacagttgaaggtggttgagcgtactcgcacggccaccatgctttgtgcagccagtggtaatccggatccagaaatcacttggtttaaagatttcttacctgtggacacaagcaacaacaatggtcgtattaagcagttacgatcagaatctattggtggtacaccaataagaggagcccttcagattgagcagagtgaagagtctgaccaaggaaaatatgagtgtgttgccaccaacagcgcgggcactcgctattccgctcctgccaatttatatgtcagagagctgcgagaagttcgccgtgtcccaccaagattctctatcccacccactaatcatgaaatcatgccaggcggaagcgttaatatcacctgtgtggccgtggggtcaccaatgccttatgtaaagtggatgttgggggcagaagatctgacacctgaagatgatatgccaataggaagaaatgtgctagaactgaatgatgtaagacagtcagcaaattacacctgtgttgctatgtcaacactgggtgtcattgaagcaatagcacagatcactgtcaaagccttacccaaacctccaggaactcctgtagtgaccgagagcacagctacaagcatcacactgacgtgggactctgggaaccctgagcctgtttcttattacataattcagcataaacctaaaaactctgaggaactttacaaagaaattgatggggtggcgaccacacgctacagtgtcgctggactaagtccctactcggattatgaattcagggttgttgctgtcaataacattgggcgggggcctcccagcgaacctgtgctaacacaaacctcagagcaagcaccatccagtgccccgagggatgtccaggcacgaatgttgagttcgaccaccattttggtacagtggaaggaacctgaagagccaaatggacagatccaaggatatagagtttattatacaatggatcccactcaacatgtcaacaactggatgaaacacaatgtagctgacagccaaatcactactattggcaacttagtgccccagaaaacatattctgtcaaagtcctggcttttacctcaattggagatggtcccctttcaagtgacatacaagtcatcactcagacaggagtaccagggcagccactaaacttcaaagcagaacctgagtctgaaacaagtattttgctctcttggacacctccacgttcagataccattgccaactatgaactggtctacaaagatggggagcatggagaggagcaacgaattaccattgagccagggacatcatataggctgcaaggactgaaaccaaacagcttatactatttccgtctggctgcacgctcccctcaaggcctgggtgcttctactgcagaaatatcagctagaaccatgcagtcaatgtttgcaaaaaattttcatgtcaaagcagtaatgaagacttccgtgttgctgtcttgggagattccagagaattataactccgccatgcctttcaaaattctttatgatgatgggaaaatggtagaagaagtggatggccgagccacacagaagttaattgtcaacctgaagcctgagaaatcatattcatttgtgctgacaaatcgtggaaacagtgctggtgggctgcagcacagggtcacggcaaagactgcaccagatgtattacgtaccaagcctgccttcattgggaagaccaacttggatggcatgattactgtgcaactgcctgaagtacctgcaaatgagaatataaaaggttactacataataattgtgcctttgaagaaatctcgcgggaaatttatcaagccatgggagagtccagatgaaatggaattagatgagctgcttaaggagatatctaggaagcgcagaagcatccgttatgggagagaagttgaattaaagccatatattgccgctcactttgatgtccttcccactgagttcaccctgggggatgacaagcattatggtggatttacaaacaagcaactccaaagtggtcaagaatatgtcttctttgtgttagcagtaatggaacatgcagagtctaagatgtatgcaaccagcccttactccgaccccgtggtgtcaatggatctggatccgcagccaatcacggatgaagaagaaggcttgatctgggttgtaggtcctgtccttgcagtggtctttatcatctgcattgtcattgctattcttctttataaaaggaagagggcagagtccgactctagaaaaagcagcataccgaacaataaggagatcccttcacaccacccaacagaccctgtagaactgaggcgccttaactttcaaacaccgggtatggctagccatcctccaatacccatcttggaacttgcagaccacattgaaagattgaaagcaaatgacaacttgaagttttcccaggaatatgagtcaattgaccctggccagcagttcacttgggaacattcaaacttggaagtaaacaaaccaaagaatagatacgcgaatgtaatcgcatatgatcattcccgggttctcctatcagctatagaagggatcccaggaagtgactatgtgaatgccaactacatagatgggtataggaagcaaaatgcctatattgcaacacagggatctctccccgaaacatttggggacttttggagaatgatatgggaacaacggagtgccacagttgtcatgatgacaaaactagaagaaagatcaagggtgaagtgtgaccagtattggcctagcagaggcacagaaacccacggactcgttcaagtaacgctgcttgatactgtggagctggccacatattgtgttcgaacatttgcactttacaagaatggttcaagtgagaagagagaagtgagacaattccagttcaccgcctggcctgatcatggtgttccagaacaccctacaccttttctagctttcttacgtagagtcaaaacctgtaaccctcccgatgctggtccgatggttgtgcactgcagtgcgggagttggccggactggttgcttcatcgtcatagatgccatgttagaaagaataaagcatgaaaaaactgtagatatttatggccatgtaactttaatgagagcccagaggaactatatggttcaaacagaagaccaatacatctttatccatgatgcactgttagaagcagtgacttgtggaaataccgaagtgccagctagaaacttgtatgcctacattcagaagctgacacaaatagaaacgggagagaatgtcacaggaatggagctcgaatttaagcgtctagccagctcaaaagctcacacctcaaggtttatcagtgccaatcttccatgtaataaattcaaaaatcgccttgttaatattatgccatatgaatccacaagggtatgcctgcagcctatccgtggagtagaaggatctgattacatcaatgccagttttattgatggatacagacaacagaaagcctacatcgctacccaggggcccttggcagagaccactgaagacttctggcggatgctctgggaacacaattccaccatagttgtgatgctcaccaagctgcgtgaaatgggcagagagaaatgtcaccaatactggccagcagaacggtctgcaagataccagtactttgttgtagatcccatggctgagtacaacatgccacagtatatcctaagggaattcaaggtcacagatgccagggacggccagtcccgaacagtaaggcagttccagttcactgactggccagagcaaggagtgccaaagtccggagaaggatttattgacttcatcggccaagtccataaaacaaaagaacagtttggccaagatggacccatttcagtccattgcagcgcgggcgttggaagaactggagtcttcataacgctaagcattgttttggaaagaatgagatatgaaggagttgtagatatcttccagactgtcaaaatgttaagaacacaacgaccagctatggtacagacagaggatcaatatcagttttcctatcgtgccgcactagagtacctgggcagctttgaccactatgcaacgtagaaacccctgacccattctggatttttactacaggcccttcaatatccatggagtctcttctgagccatacagggcacttgagaagtccttcttaacttctagctaacaactacttagtgggactattacacacaaaacaaattaaaaacaaattattccaggtggaccaagaattcacagtttaataatctaacctgaaaaataatgaagagaatcctgactgatgaggcatctgaaggattttatttacagatacctcaaggattcaaaatcaagggaagaagaaatcacagcaaagaaccaccatcttattcaggattgcttgaaaggtgcaaggagaaattgccagaatgctgcagttcagcacaagatatgtgctggtgtggcttctcacaatgaaacggactctgctttgacatcgccccttcccaccatactgctcataataacattttagggggaaaggggagggaatgtttaaaaagaaagtccttgatttagttttttagtattgtaaagatactgctgacctgtgcttcatttctaactgtgtaaacttttttttaacaaaatgtatcattcgataaagtgaattttaaaaaagttacataactcttcatttttttatttccaaatcgtaggtttttttaagctgtagaactgttatctgtaatatcttgctgtagaaatatcaaatcatttgaaaatttgcacatttttgtgcaaaactcaatctacagtatcagtctcgtcagatatattaattttacacttcagttttgattggtgagaaagtacccattctcttcaaataatcaaagataattattattttgttttgtttttggaatcaacagggaggcgcaaagtataaagttgctgctaacatatatacatatatatccatattttataagggtgtctatgtatatatagacagtgtgtccacacaaaaaatagatacagttatcagtcagtcagttcttccatgatttagtttttttaaacgtagaaaagctattgtaaacatctctttccatttattcttaattttttgacatattggtatttctttaaagggaaatgaggaatgcacatcagtgattgattgtcaaacctcaccccctgatttcctacctaatctacccccacctaaccaatcaatcacatccacaaattgttttgtttgtttgttagtcaggcttccaacaaagttcaatatttctaacactctagtgcaataaaaattattattaaatagctaagaggtgtgcatgtgggaaaggtcagtgcatatccctttaggaggggagaatgttgtaatatatcagctatcgagttgtttaaaaaaagtgtattcaatcgtatattgtctatagtatgtgctatgaaatttgcatttatgatatgtaacaggggcaaagccaaattcatgttactctgttcagtcagaaacattttgtggcatacagcattcctgggaagtgctgtactttgtttcgttttggttttagttttgcatttagagtgccttataattgatgcctattttaatagcatttctttttagcttttggttcgtatttccattcactgttcgtatctgttactttctattaaagcattatctgtttaccacatgtacaaaaactctttgaataatatgcattcctagttttcagccaagtcggggatgttagtgattgtaccagcccaaagcacttggataatcagggcccttcttccttttataatcaatcatcaacatcagaaaaagctacttgttttatttatattcccttccaaatccgctctggaacatgcagtaactgcaccaaacttattttagtaacaaatatcattggcaactttggaatatatttgatattccattaggatttttctaaaaggggaaataaactatatatatatatgtatcttacccccaattcttccaacagaatttctataggaagccatggatgatggcataagtttgccacatattacatgattttaaataatcctcaaaatacccaaggaactcttaaagagttttggtatgagtatactactttggtttaattttagcttcatggatgttctgcatggaaggatttttgttttccacattttcccattgctagcagagtgaaatccaagagaccaaacatttgcaagcattgtatttgagcacttttgtaaaaaacaaagaaaaagaaaaaaaagaaaatatatataatactaaaaaaaagtatctagaaggctacctcagaatgagactctctaacctacatcagaaccagagaagaatgtgcactatgtgggtctgttatcattattttcttttagtttgtatctttttggagatttatccaagtgccagattactcagtgctataattttcttttagttaaacaaagggggtcagacagacattgcatcatccagacatgccttgttggacatgtagaatccgatggagcactgcacaccagaatgattggccaatgagcagcttctctccctgaaacaataactgcccatttggcaaagggaaagatgacaataatcagaagaagaaaatgaatgggatgcataccatagacgaacgaggcggagactattgcgggaatcttactgttcaggagctgttcctagaactaactcccttactgtcattgatgtgcattccactctgtgcttttctgtacaaccattcaagttttaatttcccaggtgaaccatctttatctgccattaccacaagctttcaagtttccagttattttcatcatcataaccagtacggtgctattatttacctatgtacgtgtagttatgtataattttgtaattagttacaatggtaaaaaaaatcaaaatatataaaaagtgatttgtacagaactttattttagctcttttttaaaaatgatttgcatggttagaaaacggcgaggacagccaggggagggaagggcctctagggaactttgcactttctatacctttgtactatgcactgccctattgattctacacccaataatgatattacttgaacccatctgtaagaaactgcttcggaaattcatttgtgtgtatgtaaataacacaacatagaaacaggaagggaaaaaagtctgcagtaatgcacgtattttttttctttcctgtttattttcggttttgctttaagtccttttatttttaattccctttttgtttttctttttgggttttggttccttttgggtttatgggtgccctgatactccagcagagatcagaaggctacagatccattctatccatccgttatgtggctttgccatcccagcttggagtgtctttacaaagataataacagttgtgttctttgctctcgttttggatgcatagactgaaaaattaaaacaaataacttgtaaaatggcttgttaaaaaatacaattacctctaattagtagtacgcgtaaatgttttacagaatgaaaggcgtgctttttattttcttacttcgttacattggtggcgaaagaagtctgtatgaaaatcagttctttgctgacacaagttccatttgttacaaatgaattctaataaaaatgtcagtgttatgca

SEQ ID NO: 1860 - DNA, 7854 bp, Homo sapiens
cagccccagccgcatgacgcgcggaggaggcagcgggagcagccgcgggagccgggaccgggtagccgcgcgctgggggtgggcgccgctcgctccgccccgcgaagcccctgcgcgctcagggacgcggcccccccgcggcagccgcgctaggctccggcgtgtggccgcggccgccgccgccgctgccatgtctccggggaagcccggggcgggcggagcggggacgaggcggaccggctggcggaggaggaggcgaaggagacggcaggaggcggcgacgacggtgcccgggctcgggcgcacggcggggcccgattcgcgcgtccggggcacgttccagggcgcgcggggcatgaagccggcggcgcgggaggcgcggctgcctccgcgctcgcccgggctgcgctgggcgctgccgctgctgctgctgctgctgcgcctgggccagatcctgtgcgcaggtggcacccctagtccaattcctgacccttcagtagcaactgttgccacaggggaaaatggcataacgcagatcagcagtacagcagaatcctttcataaacagaatggaactggaacacctcaggtggaaacaaacaccagtgaggatggtgaaagctctggagccaacgatagtttaagaacacctgaacaaggatctaatgggactgatggggcatctcaaaaaactcccagtagcactgggcccagtcctgtgtttgacattaaagctgtttccatcagtccaaccaatgtgatcttaacttggaaaagtaatgacacagctgcttctgagtacaagtatgtagtaaagcataagatggaaaatgagaagacaattactgttgtgcatcaaccatggtgtaacatcacaggcttacgtccagcgacttcatatgtattctccatcactccaggaataggcaatgagacttggggagatcccagagtcataaaagtcatcacagagccgatcccagtttctgatctccgtgttgccctcacgggtgtgaggaaggctgctctctcctggagcaatggcaatggcactgcctcctgccgggttcttcttgaaagcattggaagccatgaggagttgactcaagactcaagacttcaggtcaatatctcgggcctgaagccaggggttcaatacaacatcaacccgtatcttctacaatcaaataagacaaagggagaccccttgggcacagaaggtggcttggatgccagcaatacagagagaagccgggcagggagccccaccgcccctgtgcatgatgagtccctcgtgggacctgtggacccatcctccggccagcagtcccgagacacggaagtcctgcttgtcgggttagagcctggcacccgatacaatgccaccgtttattcccaagcagcgaatggcacagaaggacagccccaggccatagagttcaggacaaatgctattcaggtttttgacgtcaccgctgtgaacatcagtgccacaagcctgaccctgatctggaaagtcagcgataacgagtcgtcatctaactatacctacaagatacatgtggcgggggagacagattcttccaatctcaacgtcagtgagcctcgcgctgtcatccccggactccgctccagcaccttctacaacatcacagtgtgtcctgtcctaggtgacatcgagggcacgccgggcttcctccaagtgcacaccccccctgttccagtttctgacttccgagtgacagtggtcagcacgacggagatcggcttagcatggagcagccatgatgcagaatcatttcagatgcatatcacacaggagggagctggcaattctcgggtagaaataaccaccaaccaaagtattatcattggtggcttgttccctggaaccaagtattgctttgaaatagttccaaaaggaccaaatgggactgaaggggcatctcggacagtttgcaatagaactgttcccagtgcagtgtttgacatccacgtggtctacgtcaccaccacggagatgtggctggactggaagagccctgacggtgcttccgagtatgtctaccatttagtcatagagtccaagcatggctctaaccacacaagcacgtatgacaaagcgattactctccagggcctgattccgggcaccttatataacatcaccatctctccagaagtggaccacgtctggggggaccccaactccactgcacagtacacacggcccagcaatgtgtccaacattgatgtaagtaccaacaccacagcagcaactttaagttggcagaactttgatgacgcctctcccacgtactcctactgccttcttattgagaaggctggaaattccagcaacgcaacacaagtagtcacggacattggaattactgacgctacagtcactgaattaatacctggctcatcatacacagtggagatctttgcacaagtaggggatgggatcaagtcactggaacctggccggaagtcattctgtacagatcctgcgtccatggcctccttcgactgcgaagtggtccccaaagagccagccctggttctcaaatggacctgccctcctggcgccaatgcaggctttgagctggaggtcagcagtggagcctggaacaatgcgacccacctggagagctgctcctctgagaatggcactgagtatagaacggaagtcacgtatttgaatttttctacctcgtacaacatcagcatcaccactgtgtcctgtggaaagatggcagcccccacccggaacacctgcactactggcatcacagatccccctcctccagatggatcccctaatattacatctgtcagtcacaattcagtaaaggtcaagttcagtggatttgaagccagccacggacccatcaaagcctatgctgtcattctcaccaccggggaagctggtcacccttctgcagatgtcctgaaatacacgtatgaggatttcaaaaagggagcctcagatacttatgtgacatacctcataagaacagaagaaaagggacgttctcagagcttgtctgaagttttgaaatatgaaattgacgttgggaatgagtcaaccacacttggttattacaatgggaagctggaacctctgggctcctaccgggcttgtgtggctggcttcaccaacattaccttccaccctcaaaacaaggggctcattgatggggctgagagctatgtgtccttcagtcgctactcagatgctgtttccttgccccaggatccaggtgtcatctgtggagcggtttttggctgtatctttggtgccctggttattgtgactgtgggaggcttcatcttctggagaaagaagaggaaagatgcaaagaataatgaagtgtccttttctcaaattaaacctaaaaaatctaagttaatcagagtggagaattttgaggcctacttcaagaagcagcaagctgactccaactgtgggttcgcagaggaatacgaagatctgaagcttgttggaattagtcaacctaaatatgcagcagaactggctgagaatagaggaaagaatcgctataataatgttctgccctatgatatttcccgtgtcaaactttcggtccagacccattcaacggatgactacatcaatgccaactacatgcctggctaccactccaagaaagattttattgccacacaaggacctttaccgaacactttgaaagatttttggcgtatggtttgggagaaaaatgtatatgccatcattatgttgactaaatgtgttgaacagggaagaaccaaatgtgaggagtattggccctccaagcaggctcaggactatggagacataactgtggcaatgacatcagaaattgttcttccggaatggaccatcagagatttcacagtgaaaaatatccagacaagtgagagtcaccctctgagacagttccatttcacctcctggccagaccacggtgttcccgacaccactgacctgctcatcaacttccggtacctcgttcgtgactacatgaagcagagtcctcccgaatcgccgattctggtgcattgcagtgctggggtcggaaggacgggcactttcattgccattgatcgtctcatctaccagatagagaatgagaacaccgtggatgtgtatgggattgtgtatgaccttcgaatgcataggcctttaatggtgcagacagaggaccagtatgttttcctcaatcagtgtgttttggatattgtcagatcccagaaagactcaaaagtagatcttatctaccagaacacaactgcaatgacaatctatgaaaaccttgcgcccgtgaccacatttggaaagaccaatggttacatcgcctaattccaaaggaataacctttctggagtgaaccagaccgtcgcacccacagcgaaggcacatgccccgatgtcgacatgtttttatatgtctaatatcttaattctttgttctgttttgtgagaactaattttgagggcatgaagctgcatatgatagatgacaaattggggctgtcgggggctgtggatgggtggggagcaaatcatctgcattcctgatgaccaatgggatgaggtcactttttttttttttcccccttgaggattgtggaaaaccaggaaaagggagctatgatttttttttccaaaacaatttcttttttaaaaaagactattttatatgattcacatgctaaagccaggattgtgttgggttgaatatattttaagtatcagaggtctatttttacctactgtgtcttggaatctagccgatggaaaatacctaattgtggatgatgattgcgcagggaggggtacgtggcacctcttccgaatgggttttctatttgaacatgtgccttttctgaattatgcttccacaggcaaaactcagtagagatctatatttttgtactgaatctcataattggaatatacggaatatttaaacagtagcttagcatcagaggtttgcttcctcagtaacatttctgttctcatttgatcaggggaggcctctttgccccgactccgcttcccctgccccctgtacatttgtgctccattttttcttcccttttccctcccagttttctccaaagactcttctgttggcaacattttcaacccattggttgggtgagaatggcgactcaaatatcaccttgagaatttctgtgggtgggaatgggagaagcagaggaatcctacagtggcagaaatccttttcttgtccctgtattatcctttttctcatgtctgtatttggtatgaaggattatttaaaggtgcaatatgtgaattagtgattcatgatgttctaggtttttagtaacgttttactcaggttggcattttatgtgtctgtgtctgtatgtgtgtgtgtatgttcagaagcgtggcaatctgtgaacacttcagcgtgaattcagtgtcagattaatccctccttccccaaagtccactggctttcgtctctctctgccgtgacacatatcggaatctactgtgtatatatatatatatatatatatatatatatatatatatatatatatacactaagctctcaaaaacagtcattcctatgaattgaggtgtacaaagtttgaatttgtatcaaagatgtaattattatttttaaaaccttttcactatactgctgctgtaattactttgatttttaaaatgtagattaatttttttttttttgcttcaggtgtgtatccaccaagaatttcaaatttatgtggatttattttattggtacataatctgtaaacttcttaaggcattaacatgaaaagattttttctttttattttatattgtggctcaggttatattttgaagatgttttgagtttatcctccaataggcaatgaagttgacaaggttttatgaaggaataaccaagtccctggagtcctgtggctgttgccacagtaatgtgtcctgctgtaaacaggacaggtgtgtcctgttgagaatgtgagcgggctcttccagcctcctggtccctcctgactctgccacgcccctcacctcactggcacttcgataactgactggacgtgttaatgggtcttttagggttctaaagggtgaaccacacttttaaagccccggctgtggttcggagggttagtgctgtatgccttttatttccctttccctttgaggtactgaaaggatgaaaaggtggtgtcatgttttggggagaatcttacttctcaaatggaaattgcactttttgctgaatcctttgcatttttttggtagtaagcagttcattgagtatcaggtcctcaaaggaatgagttggcccggctagggtgggccctcttgacctaacttcagagggggccttggctcagtaggtgtgaatcagggaagccacattgtcctcagggtgctgtatgaagctgggtgtgggcggattcctcccacaccttcacactggcctgcctccaactcatacagatctcggagcggtcggtacttcattcataggtccctgttcaggcagcagttctgtgggctgtggccctctcccctccaatatgtccgaaaccattgtgatgggtggcaaatcccagggagctcctaagccctgctctgcccacatcactgccacagagaagtcagaggaagggacttgttgctaaaaaatcctttaaaaggttaaatactttaaaagattaaagcaacataactgtaaacatattgtataaaaatgaaaaacacaggaaccctcttcccttccgcctggtgtgggcttgggaaatgggcaagcggccccagcaatcatgggaggaactcttgcgggggagcggtctgggattccaaatgggcaggtcacacgaaggtcacgatgcttctctgcatcctgaaaagggctggggacagggccagtgggggtggtaagggtatttatagcacagtgcttgaaaagggaagattaatgtgtaaatataaaggacacacaggctgggggttggtcagaggcaagaggagggtgcctctgagcttcaacccctcccaggaacaatgagctcaaattggaagagtccagtggaatcggggggatggtgtgagcacccctgttcagtctttgacaattgcatacagaaaagcagctggtatgggtttgggtgtcaatgaaagggccaaagactggtggccagctggtttgggggatttgggccattgatagcatctcccaggaacaacgactttttgcctccaaagttggatctagtgatgatcagcaccagcaggaaatgacatttggtgtctgcccactgcagccatactgtgacctccagccagacttccgcctaattgactccactggatttgtgctctgttgagtcagaggctcccgggggttggggatcgaggggcgggggtcagctatgcagcccatcacgtgtgtttttcatctgggatgaaaaagcctggttctcttttgaaatgcttgattgtacttattgagctaaacaagtcttggtgactgttgttgatttgcctcaaaagttttaagtcctgggttttcagactactgtgtagcagctgtgtgtttaacatactgtagctttttctcccttgggggcacatacaaataggatgtgttgatgtggactctaaactgtaattttcctgtaactattttggaatgatgcatatttctaatgtttgttatacttgtacagagtattgctgttggttgctttttttttttttaaggaaaaaatggcctgaaaacatttttttaaagacttacaaataccaaatataaaaaaatgtcaatgcattaaaaaa

SEQ ID NO: 1861 - DNA, 12709 bp, Homo sapiens
cctcccgcctcagttcgcgccgcgcctcggcttggaacgcaggagcgccggctccgggagcccgagcggagccagccgcgcgcacagccagcggccgcgccggcgatgcggggccaccccgcgcccgccccagtcccggccccggcccccgcgggaaggggctgagctgcccgccgccgcccggatggcgagcctcgccgcgctcgccctcagcctgctcctgaggctgcagctgccgccactgcccggcgcccgggctcagagcgccccaggtggctgttcctttgatgagcactacagcaactgtggttatagtgtggctctagggaccaatgggttcacctgggagcagattaacacaacggagaaaccaatgctggaccaggcagtgcccacaggatctttcatgatggtgaacagctctgggagagcctctggccagaaggcccaccttctcctgccaaccctgaaggagaatgacacccactgcatcgacttccattactacttctccagccgtgacaggtccagcccaggggccttgaacgtctacgtgaaggtgaatggtggcccccaagggaaccctgtgtggaatgtgtccggggtcgtcactgagggctgggtgaaggcagagctcgccatcagcactttctggccacatttctatcaggtgatatttgaatccgtctcattgaagggtcatcctggctacatcgccgtggacgaggtccgggtccttgctcatccatgcagaaaagcacctcattttctgcgactccaaaacgtggaggtgaatgtggggcagaatgccacatttcagtgcattgctggtgggaagtggtctcagcatgacaagctttggctccagcaatggaatggcagggacacggccctgatggtcacccgtgtggtcaaccacaggcgcttctcagccacagtcagtgtggcagacactgcccagcggagcgtcagcaagtaccgctgtgtgatccgctctgatggtgggtctggtgtgtccaactacgcggagctgatcgtgaaagagcctcccacgcccattgctcccccagagctgctggctgtgggggccacatacctgtggatcaagccaaatgccaactccatcatcggggatggccccatcatcctgaaggaagtggaatatcgcaccaccacaggcacgtgggcagagacccacatagtcgactctcccaactataagctgtggcatctggaccccgatgttgagtatgagatccgagtgctcctcacacgaccaggtgaggggggtacgggaccgccaggggctcccctcaccaccaggaccaagtgtgcagatccggtacatggcccacagaacgtggaaatcgtagacatcagagcccggcagctgaccctgcagtgggagcccttcggctacgcggtgacccgctgccatagctacaacctcaccgtgcagtaccagtatgtgttcaaccagcagcagtacgaggccgaggaggtcatccagacctcctcccactacaccctgcgaggcctgcgccccttcatgaccatccggctgcgactcttgctgtctaaccccgagggccgaatggagagcgaggagctggtggtgcagactgaggaagacgttccaggagctgttcctctagaatccatccaaggggggccctttgaggagaagatctacatccagtggaaacctcccaatgagaccaatggggtcatcacgctctacgagatcaactacaaggctgtcggctcgctggacccaagtgctgacctctcgagccagagggggaaagtgttcaagctccggaatgaaacccaccacctctttgtgggtctgtacccagggaccacctattccttcaccatcaaggccagcacagcaaagggctttgggccccctgtcaccactcggattgccaccaaaatttcagctccatccatgcctgagtacgacacagacaccccattgaatgagacagacacgaccatcacagtgatgctgaaacccgctcagtcccggggagctcctgtcagtgtttatcagctggttgtcaaggaggagcgacttcagaagtcacggagggcagctgacattattgagtgcttttcggtgcccgtgagctatcggaatgcctccagcctcgattctctacactactttgctgctgagttgaagcctgccaacctgcctgtcacccagccatttacagtgggtgacaataagacatacaatggctactggaaccctcctctctctcccctgaaaagctacagcatctacttccaggcactcagcaaagccaatggagagaccaaaatcaactgtgttcgtctggctacaaaagcaccaatgggcagcgcccaggtgaccccggggactccactctgcctcctcaccacaggtgcctccacccagaattctaacactgtggagccagagaagcaggtggacaacaccgtgaagatggctggcgtgatcgctggcctcctcatgttcatcatcattctcctgggcgtgatgctcaccatcaaaaggagaagaaatgcttattcctactcctattacttgtcccaaaggaagctggccaagaagcagaaggagacccagagtggagcccagagggagatggggcctgtggcctctgccgacaaacccaccaccaagctcagcgccagccgcaatgatgaaggcttctcttctagttctcaggacgtcaacggattcacagatggcagccgcggggagctttcccagcccaccctcacgatccagactcatccctaccgcacctgtgaccctgtggagatgagctacccccgggaccagttccaactcgccatccgggtggctgacttgctgcagcacatcacgcagatgaagagaggccagggctacgggttcaaggaggaatacgaggccttaccagaggggcagacagcttcgtgggacacagccaaggaggatgaaaaccgcaataagaatcgatatgggaacatcatatcctacgaccattcccgggtgaggctgctggtgctggatggagacccgcactctgactacatcaatgccaactacattgacggataccatcgacctcggcactacattgcgactcaaggtccgatgcaggagactgtaaaggacttttggagaatgatctggcaggagaactccgccagcatcgtcatggtcacaaacctggtggaagtgggcagggtgaaatgtgtgcgatactggccagatgacacggaggtctacggagacattaaagtcaccctgattgaaacagagcccctggcagaatacgtcatacgcaccttcacagtccagaagaaaggctaccatgagatccgggagctccgcctcttccacttcaccagctggcctgaccacggcgttccctgctatgccactggccttctgggcttcgtccgccaggtcaagttcctcaaccccccggaagctgggcccatagtggtccactgcagtgctggggctgggcggactggctgcttcattgccattgacaccatgcttgacatggccgagaatgaaggggtggtggacatcttcaactgcgtgcgtgagctccgggcccaaagggtcaacctggtacagacagaggagcaatatgtgtttgtgcacgatgccatcctggaagcgtgcctctgtggcaacactgccatccctgtgtgtgagttccgttctctctactacaatatcagcaggctggacccccagacaaactccagccaaatcaaagatgaatttcagaccctcaacattgtgacaccccgtgtgcggcccgaggactgcagcattgggctcctgccccggaaccatgataagaatcgaagtatggacgtgctgcctctggaccgctgcctgcccttccttatctcagtggacggagaatccagcaattacatcaacgcagcactgatggatagccacaagcagcctgccgccttcgtggtcacccagcaccctctacccaacaccgtggcagacttctggaggctggtgttcgattacaactgctcctctgtggtgatgctgaatgagatggacactgcccagttctgtatgcagtactggcctgagaagacctccgggtgctatgggcccatccaggtggagttcgtctccgcagacatcgacgaggacatcatccacagaatattccgcatctgtaacatggcccggccacaggatggttatcgtatagtccagcacctccagtacattggctggcctgcctaccgggacacgcccccctccaagcgctctctgctcaaagtggtccgacgactggagaagtggcaggagcagtatgacgggagggagggacgtactgtggtccactgcctaaatgggggaggccgtagtggaaccttctgtgccatctgcagtgtgtgtgagatgatccagcagcaaaacatcattgacgtgttccacatcgtgaaaacactgcgtaacaacaaatccaacatggtggagaccctggaacagtataaatttgtatacgaggtggcactggaatatttaagctccttttagctcaatgggatggggaactgccggagtccagaggctgctgtgaccaagcccccttttgtgtgaatggcagtaactgggctcaggagctctgaggtggcaccctgcctgactccaaggagaagactggtggccctgtgttccacggggggctctgcaccttctgaggggtctcctgttgccgtgggagatgctgctccaaaaggcccaggcttccttttcaacctaaccagccacagccaagggcccaagcagaagtacacccacaagcaaggccttggatttctggctcccagaccacctgcttttgttctgagtttgtggatctcttggcaagccaactgtgcaggtgctggggagtgggaggctcccctgccctccttctccttaggagtggaggagatgtgtgttctgctcctctacgtcatggaaaagattgaggctcttgggggtcactgctctgctgccccctgcaacctccttcaggggcctctggcaccagacatttgcagtctggaccagtgtgaccttacgatgttccctaggccacaagagaggccccccatcctcacacctaacctgcatggggcttcgcccacaaccattctgtaccccttccccagcctgggccttgaccgtccagcattcactggccggccagctgtgtccacagcagtttttgataaaggtgttctttgcttttttgtgtggtcagtgggagggggtggaactgcagggaacttctctgctcctccttgtctttgtaaaaagggaccacctccctggggcagggcttgggctgacctgtaggatgtaacccctgtgtttctttggtggtagctttctttggaagagacaaacaagataagatttgattattttccaaagtgtatgtgaaaagaaactttcttttggagggtgtaaaatcttagtctcttatgtcaaaaagaagggggcgggggagtttgagtatgtacctctaagacaaatctctcgggccttttattttttcctggcaatgtccttaaaagctcccaccctgggacagcatgccactgagcaaggagagatgggtgagcctgaagatggtccctttggtttctggggcaaatagagcaccagctttgtgcataatttggatgtccaaatttgaactccttcctaaagaaacccagcagccaccttgaaaaaggccattgtggagcccattatactttgatttaaaataggccaagagaatcaggcctggagatctagggtcttgtccaaagtgtgagtgagtcaatgagagggaaccaacatttgctaagtctctactgtatgccagggatcatgcttggcactttccataggacatttcacacagtccttagaacccccaggagagagctactgacttgttatcatctccatttgatcatctcctccaatgaggaaacccacgcaccttccttagtaatgaaatcctgggttccaaaggggcaggtaatggcaatgagacttctccgtgctgttttcttcatcttctctaagccaagcaattattttatggagggaaaataaggccagaaacttctgagcagataactccacaaatggaaatttagtactttcttcctgatgccagttcttctgggaagcgcagaatttcagatatattttagtaacacattcccagctccccaggaaagccagtctcatctaatttcttagtcagtaaaaacaattccctgttccttcaggctatgaatggaccagccagggaaactctcgaccttgatctctagccagtgcttaggcccaatatctgacagcctcaggtgggctgggacctaggaagctccatcttgaaggctggtctagccccagacagggcatgaggggcagagaattcaagaaggtacagctttggccctcaagagcccactgtatgctggggaaatggaaccatggtgcagtagtgtggagtggatgagtgttccatgagcctaggagcaagaaagtctcttcggcctcgggcttcctggagaaggggacgtccattcctgctgggtcttaacaagcataaaaaggaaaaaaaggaaactcaggcaaagggatccatatgtgcaatggcaaagaaatgtgaaaaggcattgggagaagcagtctgggggaggccagcccagtgcgggcacagcacaacacggggagcagcaagagatgagccagggtccaggagacagatgcccatcgcgagtacagactttgtcctattggcaacaaggagtccatggagctttagagagatgcactcagcttcgtgttggccaagactccttctgggccaatggggctgcctcttttcctttcatcagacactgtgaaaacattcccttaagcgtgcactttttaatatcacatctatttgtctgtctgctcattgttttgttgctggaactaaatatgcaatggatcatgagactcagattctatgagaaacccagggtctctgctttaccacggagcagggtcaccaacccagatctccaggcccatgaggatggaacatgaaaggagccgacaaaagttgcttccattggcatgggctctggagctgtccagaagtccagggacaccagacttgatcaaggaagggctgtcactttagaggttcaaaaggaagtgcctcaaagcaaaggcaagcaaaggaaccccacgatgaacttgctcttttcctttgatgagcctctccccaggtgtatttcagcagaccccggggacccacccccactgggcctgctggcctccctcggctccagcccaatgccccagctggccttccccagcctgcaaggagcctgtagcatggcaaatctgcctgctgtatgctattttcttagatcttggtacatccagacaggatgagggtggagggagagctatttaacacaaatcctaagatttttttctgctcaggaaggggtgaaatagctggcagatacaaaagacagtggcttttatcattttaaatggtaggaatttaaggtgtgacttcagggagaaacaaacttgcaaaaaaaaaaaatctcaggccatgttggggtaacccagcaagggccagtgatgatttcccccagctcatccccttattttcccacaacccaaccattctctaaagcaggacagtgaataggtcttaggccagtgcacacaggaagaaattgaggcttatggatggggatgacttccctaagatcccatgggacaaggatgtggcaaggcttggatgagatggggcaccagtgcccaggaatttgaacattttcctttacccaggaaatctccggagccaacaccaccacccccagggggtctccccaccccaccccatttacagggtgagctcagcctgtcatgagcagaggaaaatattattaatgctctctgagtctttacaacaggagctcttacctcatagatgtgggctctgtttggggaagatgcaaggaagtaatgagaagcccaggaaatttctccacctgtgtttatggcctaaatagcttcaggatgtatcttagctgcactccaacattgcatcctttctggggtgaagaatctgggccaaccaggggtccttgggcctctagaaggccacagtaggcctctctttgtgggaatggaaggggacagtttgcttttagtgctggccctctctgtgggtgtggcctgcaaaggaaccaacagaccctatgctggggactctaacatgtgagctcattaaattcttccagcattctaaaggagggtttgtgattgtcaccatttactgatgaggaaactaaggctcctaggggagaaatcacttgcccacagttccacagctagtgagtgaatgaaccaggatttaaaccggttttttctcactacagagacaatatttttccaccattgtatctcacatttttcccaggaggttacccataacagaagagactagagtggaacagatacgtcagtggataaagctcaaagcaaacaacagtaagcttaaaattccttcatagtctcatgttttacgttcacaattcatgcaaaatttgcattccactttctgatttagccttgttggttttaatatgactctatgaatatttcaaaaaaaaatgtgctctgttcctcatgttgttctgttctgttcaccccgctatgacggaccctaggtcagctggtcttcagcttgaccctagaattgactctaggagcagtgaccctgctgcctcccagagccagttataggctcaagatcaagaccaactgaccttctcctaggcagctcctttggtgtgtgggtgctctgacctcactgttcatgaggggacctcaactaaggcatcttccagttgggtgctggaaggaacccattaactcacactagaatgatgaggatttgctcatctggcgtggagaaggatgagcccacaaaaccctaaagggaaaagagaagctggacacagctgtactcagcagattcctgaatgctaggctggaaagtggtgcctgttgtccaagtggagtcacatggttgctaatgtgggcaagtctgaggacacacttcatgagcagctggggtctggaaggctcctcactttaccctagccacacataattactgggtgcctacagcacctagcaccttggagggggcactattaggaaatcgagattactatggcacaattaattcctgggtaaggcatggggttgtggtggacagagctcagtctttagtttgaacgaaaacatacatacatgaaaaacatacatgaaaaaaggaccctcatcaacattagaaggggtagatttggagcactttaggcaggaaaacaggaacgcaaggccaggaaactggaacccagtgaatactcagaaccgaggatgcagatgacttatttagcaaaatggtcacttctgtgacatagctggagaaaggatgggtaacagcttgccagagccacttggaacaagggcaaatctcagtgtctggggcaaaagatgatgcatttccctctgacccatcatgtttattcatcctccactccccattgccacactagctcttgctgtaagtcctcaccaggatctacatttcctcgtcgctggtgggaaccccttagagtacatagaggtatcagtccagtaagactgctctacacaacagaagtgaggcccagggagtagcagccaggcccttatcctgttacctctgcaggagtgactgcccaacccagatccagagacattgaaggaaatgataattccttggtacctcactgccttgggacaaaatgaagaaagccacccttccttaggctgcagcttgccactcctgggctgggtaaacaggtcatcagcaccaggctcaaccaggagtaacattctggaagacatgggtgagcccaagaggaagcatgaacaggacgctgttcctaagtcatgtcaacaggttgtgctgggccaggatccccagggaaaaaaatggtcaacccaactggagggtaggttagaagaaaaaaaacataaacgtggatagtcatgtcatctcaaatccctgacttggcttccccattacttgacagtctgagctccttcttagcctgtgaccagcttcaaatcacagccaagtaaaacaaggaaataggaaaagtaaatccaactagaagagacaagctgagattcagatttgtttactcctcccatgcaaagtttccctgttggaggttttccatgtatacatgtctagaagtgatagaatgcaaggccttggctttgtcttgcagggatctgcctttgaggtcatagactgaacagcagggagagaggttagtggtggagtgtggggggagctgttctagctccagtttcttctgacacatttttcaggatcatggatctgatcctccgaagcacagcagagatatctaagccatatttgtgcacatgagcagactcttctagttttttagtaaccagggatgggcttttgcatggcactgactatagagatgtcttgtagagatcaagccagtcttttgcatcccacctgcccacctccagaagagatgggaaaaggtcatcaaagggcattcaccaactgaaatccactcatgaatgttaggtctctaaaaggaggcatcaacactcacaatggtagcctccaaacctagcatcccacctatctaagagctcaggggtggtccactggggcagatacaagggaagtgcaagggctcaggatgaaagaaaatctattgggaagagttttaggggcttgatcattatggggcttccttctatatctgagaactgctctgggtggtgagatgtggactctgatccttaattggaatgttcggagaatgagtgtctggtggccttgaagtgttggacagaaaagtatcagtataaaagcctggagctcagggtaattaatgtagttcatggttccttagtgagcaggactcttggatgtggaggagaaagggtcataggaagtaaaccaccaaaattacaaaattgagtctctgtacaattacttcagtgcctttgggcttatgaatacaaatcagtgggccttctctatgatggtccaacaaactctcagtgtccaccctgtccctgtatctcccatggaagatgaataatgtcaggtgttctttgggtcaaaggccccagggcagtctggaggcttagagggcagagtggtgtcattccatgtaaagttaggcttctgaggggtcaggcagaatatggtgtccatatcttccatagctctgcagattcttggatgaagtcaagcacagtttgctagacccaggtcactcctctgagtataactaggacccatgagtgaaacttaatagctgtaaggaagaacctgctgtctgccagagaggataagctgcccatctcagcagctgtctaaaagaaggcaggtgtctctttaaagggaagagaagcattggtgaaatggatttcaggtcacttccattccagatgggtgagatcttgtggagctgggatcatgtttgaactcattcatacctgtagagcacgaatccaagtagattgtgtttggtctgtacaggctgaagccccctgctctcccacccaagtgcccccactgagcaggccaacatgctgttgtggccacatatactgggctgatccaggctggttatcaccaaacagcaaaccatagggaacagctgctttgccatagacccaatacccatgtagatctctcatgagagcagccataactcagacccactgaccaacagggccatgagtgacagccagaaccagtgaaggtccaagtaggacacagagcagggcttttcttaccatacacattatctccagaggttatttctaccccactccctattcaaggcctgttggagcacactgcaaaagcaaaagcacagtaactcaatttacacatgattataatcatttccagtgcacacatttcatcaccaggtggatcctgagctagcccatgtaaatccgggttaacccatattggtaatcatactcaaaagcacttttcaccctacattctactagccaatcaaagacaaagagttgtggcctctaccattgccttggcttctggacaccctcacaagctatcccaaggttcccgctcaactccagggaggctgacatcttcacatccactgggcatataatattgcatgagaccaaagtctccacactctttgcagcctcctccatgaatcccaatggcctgcacttgtacagtttgggtgtttgatagataaagcacgtatgagaagagaaaacaaaataaatcaactttttaaaaaagccagcactgtgctgtcaatgttttttttttcttttcaattctagctcagaaaagcagaaggtaaataatgtcaggtcaatgaatatcagatatattttttgactgtacattacagtgaagtgtaatctttttacacctgcaagtccatcttatttattcttgtaaatgttccctgacaatgtttgtaatatggctgtgttaaaaaatctatacaataaagctgtgaccctgagattcatgttttcctaagataaaaaaaa

SEQ ID NO: 1862 - DNA, 12652 bp, Homo sapiens
cctcccgcctcagttcgcgccgcgcctcggcttggaacgcaggagcgccggctccgggagcccgagcggagccagccgcgcgcacagccagcggccgcgccggcgatgcggggccaccccgcgcccgccccagtcccggccccggcccccgcgggaaggggctgagctgcccgccgccgcccggatggcgagcctcgccgcgctcgccctcagcctgctcctgaggctgcagctgccgccactgcccggcgcccgggctcagagcgccccaggtggctgttcctttgatgagcactacagcaactgtggttatagtgtggctctagggaccaatgggttcacctgggagcagattaacacaacggagaaaccaatgctggaccaggcagtgcccacaggatctttcatgatggtgaacagctctgggagagcctctggccagaaggcccaccttctcctgccaaccctgaaggagaatgacacccactgcatcgacttccattactacttctccagccgtgacaggtccagcccaggggccttgaacgtctacgtgaaggtgaatggtggcccccaagggaaccctgtgtggaatgtgtccggggtcgtcactgagggctgggtgaaggcagagctcgccatcagcactttctggccacatttctatcaggtgatatttgaatccgtctcattgaagggtcatcctggctacatcgccgtggacgaggtccgggtccttgctcatccatgcagaaaagcacctcattttctgcgactccaaaacgtggaggtgaatgtggggcagaatgccacatttcagtgcattgctggtgggaagtggtctcagcatgacaagctttggctccagcaatggaatggcagggacacggccctgatggtcacccgtgtggtcaaccacaggcgcttctcagccacagtcagtgtggcagacactgcccagcggagcgtcagcaagtaccgctgtgtgatccgctctgatggtgggtctggtgtgtccaactacgcggagctgatcgtgaaagagcctcccacgcccattgctcccccagagctgctggctgtgggggccacatacctgtggatcaagccaaatgccaactccatcatcggggatggccccatcatcctgaaggaagtggaatatcgcaccaccacaggcacgtgggcagagacccacatagtcgactctcccaactataagctgtggcatctggaccccgatgttgagtatgagatccgagtgctcctcacacgaccaggtgaggggggtacgggaccgccaggggctcccctcaccaccaggaccaagtgtgcagatccggtacatggcccacagaacgtggaaatcgtagacatcagagcccggcagctgaccctgcagtgggagcccttcggctacgcggtgacccgctgccatagctacaacctcaccgtgcagtaccagtatgtgttcaaccagcagcagtacgaggccgaggaggtcatccagacctcctcccactacaccctgcgaggcctgcgccccttcatgaccatccggctgcgactcttgctgtctaaccccgagggccgaatggagagcgaggagctggtggtgcagactgaggaagacgttccaggagctgttcctctagaatccatccaaggggggccctttgaggagaagatctacatccagtggaaacctcccaatgagaccaatggggtcatcacgctctacgagatcaactacaaggctgtcggctcgctggacccaagtgctgacctctcgagccagagggggaaagtgttcaagctccggaatgaaacccaccacctctttgtgggtctgtacccagggaccacctattccttcaccatcaaggccagcacagcaaagggctttgggccccctgtcaccactcggattgccaccaaaatttcagctccatccatgcctgagtacgacacagacaccccattgaatgagacagacacgaccatcacagtgatgctgaaacccgctcagtcccggggagctcctgtcagtgtttatcagctggttgtcaaggaggagcgacttcagaagtcacggagggcagctgacattattgagtgcttttcggtgcccgtgagctatcggaatgcctccagcctcgattctctacactactttgctgctgagttgaagcctgccaacctgcctgtcacccagccatttacagtgggtgacaataagacatacaatggctactggaaccctcctctctctcccctgaaaagctacagcatctacttccaggcactcagcaaagccaatggagagaccaaaatcaactgtgttcgtctggctaccacaggtgcctccacccagaattctaacactgtggagccagagaagcaggtggacaacaccgtgaagatggctggcgtgatcgctggcctcctcatgttcatcatcattctcctgggcgtgatgctcaccatcaaaaggagaagaaatgcttattcctactcctattacttgtcccaaaggaagctggccaagaagcagaaggagacccagagtggagcccagagggagatggggcctgtggcctctgccgacaaacccaccaccaagctcagcgccagccgcaatgatgaaggcttctcttctagttctcaggacgtcaacggattcacagatggcagccgcggggagctttcccagcccaccctcacgatccagactcatccctaccgcacctgtgaccctgtggagatgagctacccccgggaccagttccaactcgccatccgggtggctgacttgctgcagcacatcacgcagatgaagagaggccagggctacgggttcaaggaggaatacgaggccttaccagaggggcagacagcttcgtgggacacagccaaggaggatgaaaaccgcaataagaatcgatatgggaacatcatatcctacgaccattcccgggtgaggctgctggtgctggatggagacccgcactctgactacatcaatgccaactacattgacggataccatcgacctcggcactacattgcgactcaaggtccgatgcaggagactgtaaaggacttttggagaatgatctggcaggagaactccgccagcatcgtcatggtcacaaacctggtggaagtgggcagggtgaaatgtgtgcgatactggccagatgacacggaggtctacggagacattaaagtcaccctgattgaaacagagcccctggcagaatacgtcatacgcaccttcacagtccagaagaaaggctaccatgagatccgggagctccgcctcttccacttcaccagctggcctgaccacggcgttccctgctatgccactggccttctgggcttcgtccgccaggtcaagttcctcaaccccccggaagctgggcccatagtggtccactgcagtgctggggctgggcggactggctgcttcattgccattgacaccatgcttgacatggccgagaatgaaggggtggtggacatcttcaactgcgtgcgtgagctccgggcccaaagggtcaacctggtacagacagaggagcaatatgtgtttgtgcacgatgccatcctggaagcgtgcctctgtggcaacactgccatccctgtgtgtgagttccgttctctctactacaatatcagcaggctggacccccagacaaactccagccaaatcaaagatgaatttcagaccctcaacattgtgacaccccgtgtgcggcccgaggactgcagcattgggctcctgccccggaaccatgataagaatcgaagtatggacgtgctgcctctggaccgctgcctgcccttccttatctcagtggacggagaatccagcaattacatcaacgcagcactgatggatagccacaagcagcctgccgccttcgtggtcacccagcaccctctacccaacaccgtggcagacttctggaggctggtgttcgattacaactgctcctctgtggtgatgctgaatgagatggacactgcccagttctgtatgcagtactggcctgagaagacctccgggtgctatgggcccatccaggtggagttcgtctccgcagacatcgacgaggacatcatccacagaatattccgcatctgtaacatggcccggccacaggatggttatcgtatagtccagcacctccagtacattggctggcctgcctaccgggacacgcccccctccaagcgctctctgctcaaagtggtccgacgactggagaagtggcaggagcagtatgacgggagggagggacgtactgtggtccactgcctaaatgggggaggccgtagtggaaccttctgtgccatctgcagtgtgtgtgagatgatccagcagcaaaacatcattgacgtgttccacatcgtgaaaacactgcgtaacaacaaatccaacatggtggagaccctggaacagtataaatttgtatacgaggtggcactggaatatttaagctccttttagctcaatgggatggggaactgccggagtccagaggctgctgtgaccaagcccccttttgtgtgaatggcagtaactgggctcaggagctctgaggtggcaccctgcctgactccaaggagaagactggtggccctgtgttccacggggggctctgcaccttctgaggggtctcctgttgccgtgggagatgctgctccaaaaggcccaggcttccttttcaacctaaccagccacagccaagggcccaagcagaagtacacccacaagcaaggccttggatttctggctcccagaccacctgcttttgttctgagtttgtggatctcttggcaagccaactgtgcaggtgctggggagtgggaggctcccctgccctccttctccttaggagtggaggagatgtgtgttctgctcctctacgtcatggaaaagattgaggctcttgggggtcactgctctgctgccccctgcaacctccttcaggggcctctggcaccagacatttgcagtctggaccagtgtgaccttacgatgttccctaggccacaagagaggccccccatcctcacacctaacctgcatggggcttcgcccacaaccattctgtaccccttccccagcctgggccttgaccgtccagcattcactggccggccagctgtgtccacagcagtttttgataaaggtgttctttgcttttttgtgtggtcagtgggagggggtggaactgcagggaacttctctgctcctccttgtctttgtaaaaagggaccacctccctggggcagggcttgggctgacctgtaggatgtaacccctgtgtttctttggtggtagctttctttggaagagacaaacaagataagatttgattattttccaaagtgtatgtgaaaagaaactttcttttggagggtgtaaaatcttagtctcttatgtcaaaaagaagggggcgggggagtttgagtatgtacctctaagacaaatctctcgggccttttattttttcctggcaatgtccttaaaagctcccaccctgggacagcatgccactgagcaaggagagatgggtgagcctgaagatggtccctttggtttctggggcaaatagagcaccagctttgtgcataatttggatgtccaaatttgaactccttcctaaagaaacccagcagccaccttgaaaaaggccattgtggagcccattatactttgatttaaaataggccaagagaatcaggcctggagatctagggtcttgtccaaagtgtgagtgagtcaatgagagggaaccaacatttgctaagtctctactgtatgccagggatcatgcttggcactttccataggacatttcacacagtccttagaacccccaggagagagctactgacttgttatcatctccatttgatcatctcctccaatgaggaaacccacgcaccttccttagtaatgaaatcctgggttccaaaggggcaggtaatggcaatgagacttctccgtgctgttttcttcatcttctctaagccaagcaattattttatggagggaaaataaggccagaaacttctgagcagataactccacaaatggaaatttagtactttcttcctgatgccagttcttctgggaagcgcagaatttcagatatattttagtaacacattcccagctccccaggaaagccagtctcatctaatttcttagtcagtaaaaacaattccctgttccttcaggctatgaatggaccagccagggaaactctcgaccttgatctctagccagtgcttaggcccaatatctgacagcctcaggtgggctgggacctaggaagctccatcttgaaggctggtctagccccagacagggcatgaggggcagagaattcaagaaggtacagctttggccctcaagagcccactgtatgctggggaaatggaaccatggtgcagtagtgtggagtggatgagtgttccatgagcctaggagcaagaaagtctcttcggcctcgggcttcctggagaaggggacgtccattcctgctgggtcttaacaagcataaaaaggaaaaaaaggaaactcaggcaaagggatccatatgtgcaatggcaaagaaatgtgaaaaggcattgggagaagcagtctgggggaggccagcccagtgcgggcacagcacaacacggggagcagcaagagatgagccagggtccaggagacagatgcccatcgcgagtacagactttgtcctattggcaacaaggagtccatggagctttagagagatgcactcagcttcgtgttggccaagactccttctgggccaatggggctgcctcttttcctttcatcagacactgtgaaaacattcccttaagcgtgcactttttaatatcacatctatttgtctgtctgctcattgttttgttgctggaactaaatatgcaatggatcatgagactcagattctatgagaaacccagggtctctgctttaccacggagcagggtcaccaacccagatctccaggcccatgaggatggaacatgaaaggagccgacaaaagttgcttccattggcatgggctctggagctgtccagaagtccagggacaccagacttgatcaaggaagggctgtcactttagaggttcaaaaggaagtgcctcaaagcaaaggcaagcaaaggaaccccacgatgaacttgctcttttcctttgatgagcctctccccaggtgtatttcagcagaccccggggacccacccccactgggcctgctggcctccctcggctccagcccaatgccccagctggccttccccagcctgcaaggagcctgtagcatggcaaatctgcctgctgtatgctattttcttagatcttggtacatccagacaggatgagggtggagggagagctatttaacacaaatcctaagatttttttctgctcaggaaggggtgaaatagctggcagatacaaaagacagtggcttttatcattttaaatggtaggaatttaaggtgtgacttcagggagaaacaaacttgcaaaaaaaaaaaatctcaggccatgttggggtaacccagcaagggccagtgatgatttcccccagctcatccccttattttcccacaacccaaccattctctaaagcaggacagtgaataggtcttaggccagtgcacacaggaagaaattgaggcttatggatggggatgacttccctaagatcccatgggacaaggatgtggcaaggcttggatgagatggggcaccagtgcccaggaatttgaacattttcctttacccaggaaatctccggagccaacaccaccacccccagggggtctccccaccccaccccatttacagggtgagctcagcctgtcatgagcagaggaaaatattattaatgctctctgagtctttacaacaggagctcttacctcatagatgtgggctctgtttggggaagatgcaaggaagtaatgagaagcccaggaaatttctccacctgtgtttatggcctaaatagcttcaggatgtatcttagctgcactccaacattgcatcctttctggggtgaagaatctgggccaaccaggggtccttgggcctctagaaggccacagtaggcctctctttgtgggaatggaaggggacagtttgcttttagtgctggccctctctgtgggtgtggcctgcaaaggaaccaacagaccctatgctggggactctaacatgtgagctcattaaattcttccagcattctaaaggagggtttgtgattgtcaccatttactgatgaggaaactaaggctcctaggggagaaatcacttgcccacagttccacagctagtgagtgaatgaaccaggatttaaaccggttttttctcactacagagacaatatttttccaccattgtatctcacatttttcccaggaggttacccataacagaagagactagagtggaacagatacgtcagtggataaagctcaaagcaaacaacagtaagcttaaaattccttcatagtctcatgttttacgttcacaattcatgcaaaatttgcattccactttctgatttagccttgttggttttaatatgactctatgaatatttcaaaaaaaaatgtgctctgttcctcatgttgttctgttctgttcaccccgctatgacggaccctaggtcagctggtcttcagcttgaccctagaattgactctaggagcagtgaccctgctgcctcccagagccagttataggctcaagatcaagaccaactgaccttctcctaggcagctcctttggtgtgtgggtgctctgacctcactgttcatgaggggacctcaactaaggcatcttccagttgggtgctggaaggaacccattaactcacactagaatgatgaggatttgctcatctggcgtggagaaggatgagcccacaaaaccctaaagggaaaagagaagctggacacagctgtactcagcagattcctgaatgctaggctggaaagtggtgcctgttgtccaagtggagtcacatggttgctaatgtgggcaagtctgaggacacacttcatgagcagctggggtctggaaggctcctcactttaccctagccacacataattactgggtgcctacagcacctagcaccttggagggggcactattaggaaatcgagattactatggcacaattaattcctgggtaaggcatggggttgtggtggacagagctcagtctttagtttgaacgaaaacatacatacatgaaaaacatacatgaaaaaaggaccctcatcaacattagaaggggtagatttggagcactttaggcaggaaaacaggaacgcaaggccaggaaactggaacccagtgaatactcagaaccgaggatgcagatgacttatttagcaaaatggtcacttctgtgacatagctggagaaaggatgggtaacagcttgccagagccacttggaacaagggcaaatctcagtgtctggggcaaaagatgatgcatttccctctgacccatcatgtttattcatcctccactccccattgccacactagctcttgctgtaagtcctcaccaggatctacatttcctcgtcgctggtgggaaccccttagagtacatagaggtatcagtccagtaagactgctctacacaacagaagtgaggcccagggagtagcagccaggcccttatcctgttacctctgcaggagtgactgcccaacccagatccagagacattgaaggaaatgataattccttggtacctcactgccttgggacaaaatgaagaaagccacccttccttaggctgcagcttgccactcctgggctgggtaaacaggtcatcagcaccaggctcaaccaggagtaacattctggaagacatgggtgagcccaagaggaagcatgaacaggacgctgttcctaagtcatgtcaacaggttgtgctgggccaggatccccagggaaaaaaatggtcaacccaactggagggtaggttagaagaaaaaaaacataaacgtggatagtcatgtcatctcaaatccctgacttggcttccccattacttgacagtctgagctccttcttagcctgtgaccagcttcaaatcacagccaagtaaaacaaggaaataggaaaagtaaatccaactagaagagacaagctgagattcagatttgtttactcctcccatgcaaagtttccctgttggaggttttccatgtatacatgtctagaagtgatagaatgcaaggccttggctttgtcttgcagggatctgcctttgaggtcatagactgaacagcagggagagaggttagtggtggagtgtggggggagctgttctagctccagtttcttctgacacatttttcaggatcatggatctgatcctccgaagcacagcagagatatctaagccatatttgtgcacatgagcagactcttctagttttttagtaaccagggatgggcttttgcatggcactgactatagagatgtcttgtagagatcaagccagtcttttgcatcccacctgcccacctccagaagagatgggaaaaggtcatcaaagggcattcaccaactgaaatccactcatgaatgttaggtctctaaaaggaggcatcaacactcacaatggtagcctccaaacctagcatcccacctatctaagagctcaggggtggtccactggggcagatacaagggaagtgcaagggctcaggatgaaagaaaatctattgggaagagttttaggggcttgatcattatggggcttccttctatatctgagaactgctctgggtggtgagatgtggactctgatccttaattggaatgttcggagaatgagtgtctggtggccttgaagtgttggacagaaaagtatcagtataaaagcctggagctcagggtaattaatgtagttcatggttccttagtgagcaggactcttggatgtggaggagaaagggtcataggaagtaaaccaccaaaattacaaaattgagtctctgtacaattacttcagtgcctttgggcttatgaatacaaatcagtgggccttctctatgatggtccaacaaactctcagtgtccaccctgtccctgtatctcccatggaagatgaataatgtcaggtgttctttgggtcaaaggccccagggcagtctggaggcttagagggcagagtggtgtcattccatgtaaagttaggcttctgaggggtcaggcagaatatggtgtccatatcttccatagctctgcagattcttggatgaagtcaagcacagtttgctagacccaggtcactcctctgagtataactaggacccatgagtgaaacttaatagctgtaaggaagaacctgctgtctgccagagaggataagctgcccatctcagcagctgtctaaaagaaggcaggtgtctctttaaagggaagagaagcattggtgaaatggatttcaggtcacttccattccagatgggtgagatcttgtggagctgggatcatgtttgaactcattcatacctgtagagcacgaatccaagtagattgtgtttggtctgtacaggctgaagccccctgctctcccacccaagtgcccccactgagcaggccaacatgctgttgtggccacatatactgggctgatccaggctggttatcaccaaacagcaaaccatagggaacagctgctttgccatagacccaatacccatgtagatctctcatgagagcagccataactcagacccactgaccaacagggccatgagtgacagccagaaccagtgaaggtccaagtaggacacagagcagggcttttcttaccatacacattatctccagaggttatttctaccccactccctattcaaggcctgttggagcacactgcaaaagcaaaagcacagtaactcaatttacacatgattataatcatttccagtgcacacatttcatcaccaggtggatcctgagctagcccatgtaaatccgggttaacccatattggtaatcatactcaaaagcacttttcaccctacattctactagccaatcaaagacaaagagttgtggcctctaccattgccttggcttctggacaccctcacaagctatcccaaggttcccgctcaactccagggaggctgacatcttcacatccactgggcatataatattgcatgagaccaaagtctccacactctttgcagcctcctccatgaatcccaatggcctgcacttgtacagtttgggtgtttgatagataaagcacgtatgagaagagaaaacaaaataaatcaactttttaaaaaagccagcactgtgctgtcaatgttttttttttcttttcaattctagctcagaaaagcagaaggtaaataatgtcaggtcaatgaatatcagatatattttttgactgtacattacagtgaagtgtaatctttttacacctgcaagtccatcttatttattcttgtaaatgttccctgacaatgtttgtaatatggctgtgttaaaaaatctatacaataaagctgtgaccctgagattcatgttttcctaagataaaaaaaa

SEQ ID NO: 1863 - DNA, 609 bp, Homo sapiens
atggctactctgatctatgttgataaggaaaacgaagaaccaggcatccttgtggctacaaaggatgggctgaagctggggtctggaccttcaatcaaagccttagatgggagatctcaagtttcaatatcatgttttggcaaaacattcgatgctcccacatccttacctaaagctaccagaaaggctttgggaactgtcaacagagctacagaaaagtcagtaaagaccaatggacccctcaaacaaaaacagccaagcttttctgccaaaaagatgactgagaagactgttaaagcaaaaaactctgttcctgcctcagatgatggctatccagaaatagaaaaattatttcccttcaatcctctaggcttcgagagttttgacctgcctgaagagcaccagattgcacatctccccttgagtgaagtgcctctcatgatacttgatgaggagagagagcttgaaaagctgtttcagctgggccccccttcacctttgaagatgccctctccaccatggaaatccaatctgttgcagtctcctttaagcattctgttgaccctggatgttgaattgccacctgtttgctgtgacatagatatttaa

SEQ ID NO: 1864 - DNA, 1781 bp, Homo sapiens
agtcgcttttgttctcgcgatatttccgggtacgcgggagccccggcgacccgggcttctgtgaaacatggcggtaggctgggaccataacacaagcatgactatatgaaggaagaggaaggttttcctgaagatgaggcgactgaatcggaaaaaaactttaagtttggtaaaagagttggatgcctttccgaaggttcctgagagctatgtagagacttcagccagtggaggtacagtttctctaatagcatttacaactatggctttattaaccataatggaattctcagtatatcaagatacatggatgaagtatgaatacgaagtagacaaggatttttctagcaaattaagaattaatatagatattactgttgccatgaagtgtcaatatgttggagcggatgtattggatttagcagaaacaatggttgcatctgcagatggtttagtttatgaaccaacagtatttgatctttcaccacagcagaaagagtggcagaggatgctgcagctgattcagagtaggctacaagaagagcattcacttcaagatgtgatatttaaaagtgcttttaaaagtacatcaacagctcttccaccaagagaagatgattcatcacagtctccaaatgcatgcagaattcatggccatctatatgtcaataaagtagcagggaattttcacataacagtgggcaaggcaattccacatcctcgtggtcatgcacatttggcagcacttgtcaaccatgaatcttacaatttttctcatagaatagatcatttgtcttttggagagcttgttccagcaattattaatcctttagatggaactgaaaaaattgctatagatcacaaccagatgttccaatattttattacagttgtgccaacaaaactacatacatataaaatatcagcagacacccatcagttttctgtgacagaaagggaacgtatcattaaccatgctgcaggcagccatggagtctctgggatatttatgaaatatgatctcagttctcttatggtgacagttactgaggagcacatgccattctggcagttttttgtaagactctgtggtattgttggaggaatcttttcaacaacaggcatgttacatggaattggaaaatttatagttgaaataatttgctgtcgtttcagacttggatcctataaacctgtcaattctgttccttttgaggatggccacacagacaaccacttacctcttttagaaaataatacacattaacacctcccgattgaaggagaaaaactttttgcctgagacataaaacctttttttaataataaaatattgtgcaatatattcaaagaaaagaaaacacaaataagcagaaaacatacttattttaaaaaagaaaaaaaaggataaaaaaacccaaactgaaattctatatacgttgtgtctgttacaaatgtcgtagaagaaatcatgcagctaaacgatgaagaagcccaactggagtgttgctttgaagatgacgccttcttatattttcatagcaaatgggtggtatcaaaatcagacattgcttcttgctgataaaaagcctgaaggaaataagtgaaactacatctatgggaaaaaaaaaaacattgagaagtgcaaatgttcgcatccttttgtttttaaaagatatgatgtcagaataaaatgtggaaaacatacggaaaactagtctagactttaaagaattgtgatcaggtcacattgttaataaaaaaaaaaaacgggctaaaaa

SEQ ID NO: 1865 - DNA, 1955 bp, Homo sapiens
attcatccccattcaggctttcctcagcatttattaaggactctctgctccagcctctcactctcactctcctccgctcaaactcagctcacttgagagtctcctcccgccagctgtggaaagaactttgcgtctctccagcaatgcatctccttgcgattctgttttgtgctctctggtctgcagtgttggccgagaactcggatgattatgatctcatgtatgtgaatttggacaacgaaatagacaatggactccatcccactgaggaccccacgccgtgcgcctgcggtcaggagcactcggaatgggacaagctcttcatcatgctggagaactcgcagatgagagagcgcatgctgctgcaagccacggacgacgtcctgcggggcgagctgcagaggctgcgggaggagctgggccggctcgcggaaagcctggcgaggccgtgcgcgccgggggctcccgcagaggccaggctgaccagtgctctggacgagctgctgcaggcgacccgcgacgcgggccgcaggctggcgcgtatggagggcgcggaggcgcagcgcccagaggaggcggggcgcgccctggccgcggtgctagaggagctgcggcagacgcgagccgacctgcacgcggtgcagggctgggctgcccggagctggctgccggcaggttgtgaaacagctattttattcccaatgcgttccaagaagatttttggaagcgtgcatccagtgagaccaatgaggcttgagtcttttagtgcctgcatttgggtcaaagccacagatgtattaaacaaaaccatcctgttttcctatggcacaaagaggaatccatatgaaatccagctgtatctcagctaccaatccatagtgtttgtggtgggtggagaggagaacaaactggttgctgaagccatggtttccctgggaaggtggacccacctgtgcggcacctggaattcagaggaagggctcacatccttgtgggtaaatggtgaactggcggctaccactgttgagatggccacaggtcacattgttcctgagggaggaatcctgcagattggccaagaaaagaatggctgctgtgtgggtggtggctttgatgaaacattagccttctctgggagactcacaggcttcaatatctgggatagtgttcttagcaatgaagagataagagagaccggaggagcagagtcttgtcacatccgggggaatattgttgggtggggagtcacagagatccagccacatggaggagctcagtatgtttcataaatgttgtgaaactccacttgaagccaaagaaagaaactcacacttaaaacacatgccagttgggaaggtctgaaaactcagtgcataataggaacacttgagactaatgaaagagagagttgagaccaatctttatttgtactggccaaatactgaataaacagttgaaggaaagacattggaaaaagcttttgaggataatgttactagactttatgccatggtgctttcagtttaatgctgtgtctctgtcagataaactctcaaataattaaaaaggactgtattgttgaacagagggacaattgttttacttttctttggttaattttgttttggccagagatgaattttacattggaagaataacaaaataagatttgttgtccattgttcattgttattggtatgtaccttattacaaaaaaaagatgaaaacatatttatactacaaggtgacttaacaactataaatgtagtttatgtgttataatcgaatgtcacgtttttgagaagatagtcatataagttatattgcaaaagggatttgtattaatttaagactatttttgtaaagctctactgtaaataaaatattttataaaactagctcacgtcatttaattataaatttaagagatgttttggaaaaaaaaaaaaaaaaaa

SEQ ID NO: 1866 - DNA, 2048 bp, Homo sapiens
gtgttgacagcggcggcggtggaaccgggcgggcggcgggagtcggcgcctcgggttcctacctcgcgtccctaggcggcggcggccgggcgtcccgggatggccttcatggagaagccgccagccggcaaggtgctgctggacgacacggtgccgctgacagcagccatcgaggcgagccagagcctgcagtcccacacggaatatattattcgagtgcaaagaggaatttctgtggaaaacagctggcagattgttagaagatacagtgactttgatttgcttaacaacagcttacagattgcaggcctaagtctacctcttcctcccaaaaaattgattggtaacatggatcgtgaattcatagctgaaaggcagaaaggtcttcagaactatctcaacgtgatcacaacaaatcatatcttgtctaattgtgagctggttaagaagtttttagatccaaacaactattccgcaaactatactgagattgccttgcaacaggtttccatgttcttccgatcagaaccaaagtgggaggtggtggaacctttgaaagacataggttggagaataaggaagaaatatttcttgatgaagattaaaaatcagccaaaggaacggctagtgttaagctgggctgaccttggcccagacaagtatttgtcagataaagattttcagtgtctaatcaaacttctgccttcttgtttgcacccttacatctatcgggttacctttgccacagctaatgaatcctcagcgttgctaattaggatgtttaacgaaaagggaacattgaaggatctgatctacaaggcaaaaccaaaagacccatttctaaagaagtactgcaaccctaagaagattcagggcctggaactccagcaaataaaaacatatggacggcaaatattagaggtactgaagtttcttcatgacaagggattcccttatgggcatcttcacgcctccaatgtgatgctcgatggggacacttgccggctgctggaccttgagaattccttattgggcctgccttccttctaccgatcttatttttcacaattcaggaaaatcaatacattggaaagtgtggatgtccactgctttggccacttactgtatgaaatgacttatggacgaccgccagactcggtgcctgtggactccttccctcctgccccgtccatggctgtggtggccgtgttggagtctacgctgtcttgtgaagcctgtaaaaatggcatgcctaccatctcccggctcttacagatgccattattcagcgatgttttactaaccacttctgaaaaaccacagtttaagatccctacaaagttaaaagaggcattgagaattgccaaagaatgtatagagaagagactaattgaggaacagaaacagattcaccagcatcgaagactgacaagagctcagtcccaccatggatctgaggaggaaagaaaaaaaagaaagattttagctcgaaagaagtcaaaacgatctgctcttgaaaatagtgaagagcattcagcgaagtacagcaactccaataattcagcaggatctggggccagctcacctctcacgtccccgtcatcgccaactccaccctctacatcagggatatctgcattacctccacctcctccacctccaccaccaccagcagctcccttgcctcctgcgagcaccgaggcacctgcccagctctcgtctcaggctgtgaatggcatgagccgaggggccttgctcagctccatccagaatttccaaaaaggaactttgaggaaagccaaaacctgtgatcacagtgctccgaagatcggctgaagcttcctgtttacacttggagggaaaagttcttttttattcctactcacccctaccccccaaactaccctcttcctgggaaagtaattgctgagccagtacagccacaaacagtactattttgcagatgctcatgtaagcagcttttcgagagaaataattctttaagcagaataaagttaggctggcatgcaaaaaaaaaaaaaaaaaaa

SEQ ID NO: 1867 - DNA, 2437 bp, Homo sapiens
ctgcaatggcggctctagactccctgtcgctcttcactagcctcggcctgagcgagcagaaggcccgcgagacgctcaagaactcggctctgagcgcgcagctgcgcgaggccgctactcaggctcagcagaccctgggttccaccattgacaaagctaccgggatcctgttatatggcttggcctcccgactcagggatacccggcgtctctccttccttgtaagctacatagccagtaagaagatccacactgagccccagctaagcgctgcccttgagtatgtgcggagtcaccccttggaccccatcgacactgtggacttcgagcgggaatgtggcgtgggtgtcattgtgaccccagagcagattgaggaggctgtggaggctgctattaacaggcaccggccccagctcctggtggaacgttaccatttcaacatggggctgctgatgggagaggctcgggctgtgctgaagtgggcagatggcaaaatgatcaagaatgaagtggacatgcaggtcctccaccttctgggccccaagttggaggctgatctggagaagaagttcaaggtggcaaaagctcggctagaagaaacagaccggaggacggcaaaggatgtggtggagaatggcgagactgctgaccagaccctgtctctgatggagcagctccggggggaggcccttaagttccacaagcctggtgagaactacaagaccccaggctatgtggtcactccacacaccatgaatctactaaagcagcacctggagattactggtgggcaggtacgtacccggttcccgccagaacccaatggaatcctgcatattggacatgccaaagccatcaatttcaactttggctatgccaaggccaacaatggcatctgttttctgcgttttgatgacaccaaccctgagaaggaggaagcaaagttcttcacggccatctgtgacatggtagcctggctaggctacacaccttacaaagtcacatatgcgtctgactattttgaccagctatatgcgtgggctgtggagctcatccgcaggggtctggcttatgtgtgccaccagcgaggagaggagctcaaaggccataatactctgccttcaccctggagagaccgtcccatggaggagtcactgctgctctttgaggcaatgcgcaagggcaagttttcagagggcgaggccacactacggatgaagctggtgatggaggatggcaagatggaccctgtagcctatcgagtcaagtatacaccacaccaccgcacaggggacaaatggtgcatctatcccacctacgactacacacactgcctctgtgactccatcgagcacatcactcactcactctgcaccaaggaattccaggcccgacgctcttcctacttctggctttgcaatgcactggacgtctattgccctgtgcagtgggagtatggccgcctcaacctgcactatgctgttgtctctaagaggaagatcctccagcttgtagcaactggtgctgtgcgggactgggatgacccacggctctttacactcacggccctgcgacggcggggcttcccacctgaggccatcaacaacttctgtgcccgggtgggagtgactgtggcacaaaccacaatggagccacatcttctagaagcctgtgtgcgtgatgtgctgaatgacacagccccacgagccatggctgtgctggagtcactacgggtcatcatcaccaactttcctgctgccaagtccttggacatccaggtgcccaacttcccagctgatgagaccaaaggcttccatcaggttccctttgcacccattgtcttcattgagaggactgacttcaaggaggagccagagccaggatttaagcgcctggcttggggccagcctgtgggcctgaggcatacaggctacgtcattgagctgcagcatgttgtcaagggccccagtggttgtgtagagagtctggaggtgacctgcagacgggcagatgctggagagaagccaaaggcctttattcactgggtgtcacagcctttgatgtgtgaggttcgcctctatgagcgactattccagcacaagaaccctgaagatcctactgaggtgcctggtggatttttaagtgacctgaacctggcatcactacacgtggtggatgcagcattagtggactgctctgtggccctggcaaaacccttcgacaagttccagtttgagcgtcttggatatttctccgtggatccagacagccatcagggaaagcttgtctttaaccgaactgtcacactgaaggaagacccaggaaaggtgtgagctggaagcactgaacctacctcatcctcctggagggtgtggctaccctcgccaccccaaattccatgtcaataaagaacagctaaattctcctagaaaaaaaa

SEQ ID NO: 1868 - DNA, 4008 bp, Homo sapiens
aggcagtgattttggggcagagaattttgcaacacgtggtagtgaactgtgaggagtttgaggggtctgaagactgaaagagtcgaatggtttgttggcagggtgtcctggtggattggtttctgtaagttcagattctcataaatcgtgtgagcgtcgccgacacctctgagataaaagggcccctttcgactagcctctgctgaaaggacctagaagaatcccttaggatgaagctgagtcttaccaaggtagttaatggctgtcgcctaggaaaaataaaaaacctgggcaaaacaggggaccacaccatggatattccaggctgccttctgtataccaagactggctccgccccacacctcacccatcacacgctgcataatatccacggggttcctgccatggctcagcttacgctgtcatccctagcagaacatcatgaagtcttgacagaatataaagaaggagttggaaagtttataggcatgccagaatcactcttgtactgctccctgcacgatccagtcagcccctgcccggctggttatgtaacaaacaagtctgtgtctgtgtggagtgttgcaggacgagtggaaatgactgtttccaagttcatggcaattcagaaggcccttcagccagactggttccagtgcctctccgatggagaagtatcttgtaaggaagcaacttccataaaaagggtcagaaagtctgttgaccgatcacttcttttcttggataactgtctgcggctgcaggaagagtcagaggttcttcagaagagtgtgatcattggagtgattgaaggtggagatgtgatggaagagaggctgaggtcagcacgagagacagccaagcggcctgtgggtggcttccttctggatggttttcaaggaaatccaacaaccctggaggctagactacgcttgctgtcatcagtcactgcagagctgccggaggacaagccaaggctcatatctggtgttagtcggccagatgaggtgctcgagtgtattgaaagaggagtggacttatttgagagttttttcccttatcaagtaacagagcggggatgtgccctgactttcagttttgattaccagccgaatcctgaagagacactactacaacaaaatggaacacaagaagaaataaaatgtatggatcaaataaagaaaattgaaacaactggttgcaaccaagaaataacatcatttgaaattaatctgaaggaaaaaaagtaccaggaggactttaacccgctggtgagaggatgttcctgttactgctgtaagaatcacactcgggcatacatccaccatctgctggtgaccaatgagctgctggccggagtcctgcttatgatgcacaactttgaacactactttgggtttttccattacatccgggaagcactaaaaagtgacaaactggcacagttgaaagagctcatccacaggcaagcatcttgagatcttgcaaatacaagtctcactcttcacactgagcctgtaccactgttgtaacatgggaagacgtgaagaagaaataatctgagctttaattatttatatttggatataaggtctgcttaaataaagaatctttgtaccaaactgcccacatgagggtgaagagatttcctcaaaagacttaaatgacctggattgatcagagagaattgaactgtgacctttaagacttctagactaattcttttagttgatagagattcatttagtcaaagacaaaagctttaactgtgagggcacagccttgaagtgggagtgatgagattctgagggacccatgaattggattgaggcttgaggggaaatggtgtgagacgaatgggctctggacatatgcctgttgatttgagaagaaatctggctggtttgagggtttcctttagttcaccctcatactctcaggagactcttctggatacttttgtcttccaccctgccctggcagtgcagccaatcagaaatggctcttgtgacttaactgggcttggatatccctggaatgtggggcttgaacattgctcctgtgatgatcatctgtcccaggtcacactccttcatttgaccacatggcctatttgcaacttctttttagagccaatgtaattgcctgttaggagccagaagtttgcccagctgctttcttctggttgtacagatccattgtggtctgccttccaggctcattaatagtctaactacgtaataactgaagacctatctcttgtgaagattcattctcaatgtgttcacttggacagagccctgcctggcctaacgattagagggttagtctccatcctgctcagatatgactcctgggcaattcacttaacttctccatggctgcttcctgctgaataaatagggacaggcataatggataggaatgaatgaacttttaagatactgtctagctctaaaattggaagaacaaaaagttttagattagagtcatagccttaatagccctagttgtcatcctgggagacaggcaacagtagagatatttgagagcctaaagagaggtttggcctgtgggtttttaagtggttattgaattggtatcaggagatcctgaggctggtaggggaaggtaattctttctaagttacctctgtatttttcaagttttctataaggaatacacatacacccacatgcacacaccatagtttttatacaaacagcaataacaaaaccaaaaagatgcccctttttttgtagggataagaaatacatttgttttatacttctatgctatattttgctattcaaaatttagtgggcattacttaacattgtttctaattattttgtggctgctgtatgttttatgtgttgggagcccattgtattaggccgttcttggattgctataaagaaatacctgagactgggtaatttggttttttggttttttggggttttttttgagacggagccttgctctgtcgcccaggctggagtgcagtggcgcgatctcggctctatgcaacctccacctcctgggttcatgccattctcctgcctcagcctcccgtgtagctgggactacaggcgcccgccaccatgcctggctaattttttatatttttagtagagatggggtttcaccgtatgagccaggatggtctcgatctcctgacctcatgatccacaagactgggtaatctgtaaagaaaagaggtttaattggctcatggctctgcaggctttacaggaagcatggtactggcatctgcttggtttctggggaggcctccggaagcttatagtcatgacagaaggtgaagggggagcaggcacatcacatgacaaaagcaggaacaagactcagagcaagaagtcacttatcaccaaggggatggcccaggccattcatgagggatccacctttgtgctccaaacacctcccaccaggccccacctccagtattggggattacatttcaacttgaggtttgggcgggaacaaatagtcaaattatattacccatctacatggttttctttttcttagtatgggagtgtccatgaataaattcatgggcatcctcataactcttccatgaatggcaaggggtacttatggaaaacagttttccaaagatctgattgttttgaaatgtgttagattggacttgttcaaatgttcatatttttgttctatgctaaatgcatcgttaggggagtagtggtaaatattccagaatccatatgaaattcatgagtttatttatgtctaaaacactgaaaactgtgtccaatatcgttcagtttcctgggtctttttcttattagcacatttgagaaaaatattcctttcctttattgtagtaaatctattaaaggcaatagccaataaaacatttttaattttaaaaatttactgtgtttggctttctgtaaatgtagtaggtctgttaaacaaaatattaaatttccatagtaccagaaaaaaaaaaaaaaa

SEQ ID NO: 1869 - DNA, 1211 bp, Homo sapiens
ctgggctccgtgccgctctgtttgccaaccgtccagtcccgcctaccagtgccgggcgctccccacccctcccccggctcccccggtgtccgccatggccaaagcctacgaccacctcttcaagttgctgctgatcggggactcgggggtgggcaagacttgtctgatcattcgctttgcagaggacaacttcaacaacacttacatctccaccatcggaattgatttcaagatccgcactgtggatatagaggggaagaagatcaaactacaagtctgggacacggctggccaagagcggttcaagacaataactactgcctactaccgtggagccatgggcattatcctagtatacgacatcacggatgagaaatctttcgagaatattcagaactggatgaaaagcatcaaggagaatgcctcggctggggtggagcgcctcttgctggggaacaaatgtgacatggaggccaagaggaaggtgcagaaggagcaggccgataagttggctcgagagcatggaatccgatttttcgaaactagtgctaaatccagtatgaatgtggatgaggcttttagttccctggcccgggacatcttgctcaagtcaggaggccggagatcaggaaacggcaacaagcctcccagtactgacctgaaaacttgtgacaagaagaacaccaacaagtgctccctgggctgaggaccctttcttgcctccccaccccggaagctgaacctgagggagacaacggcagagggagtgagcaggggagaaatagcagaggggcttggagggtcacataggtagatggtaaagagaatgaggagaaaaaggagaaaagggaaaagcagaaaggaaaaaaaggaagagagaggaagggagaagggagaggaatgaattgaggaagtgaaagaaggcaaggaggtaggaagagagggaggaggaaaggaaggagagatgcctcaggcttcagaccttacctgggttttcagggcaaacataaatgtaaatacactgatttattctgttactagatcaggttttagggtcctgcaaaaggctagctcggcactacactagggaatttgctcctgttctgtcacttgtcatggtctttcttggtattaaaggccaccatttgcacaaaaaaaaaaaaaaaaaaaaaaaaaaaaaaaaaaaaaaaaaaaaaaaaaaaaaaaaaaaa

SEQ ID NO: 1870 - DNA, 1101 bp, Homo sapiens
ctctgcttccttacagcacccccacctgccagagctgatcctccctaggccctgcctaaccttgagttggcccccaatccctctggctgcagaagtccccttacccccaatgagaggaggggcaggaccagatcttttgagagctgagggttgagggcattgagccaacacacagatttgtcgcctctgtccccgaagacacctgcaccctccatgcggagccaagatggggaatggaactgaggaagattataactttgtcttcaaggtggtgctgatcggcgaatcaggtgtggggaagaccaatctactctcccgattcacgcgcaatgagttcagccacgacagccgcaccaccatcggggttgagttctccacccgcactgtgatgttgggcaccgctgctgtcaaggctcagatctgggacacagctggcctggagcggtaccgagccatcacctcggcgtactatcgtggtgcagtgggggccctcctggtgtttgacctaaccaagcaccagacctatgctgtggtggagcgatggctgaaggagctctatgaccatgctgaagccacgatcgtcgtcatgctcgtgggtaacaaaagtgacctcagccaggcccgggaagtgcccactgaggaggcccgaatgttcgctgaaaacaatggactgctcttcctggagacctcagccctggactctaccaatgttgagctagcctttgagactgtcctgaaagaaatctttgcgaaggtgtccaagcagagacagaacagcatccggaccaatgccatcactctgggcagtgcccaggctggacaggagcctggccctggggagaagagggcctgttgcatcagcctctgaccttggccagcaccacctgcccccactggctttttggtgccccttgtccccacttcagccccaggacctttccttgccctttggttccagatatcagactgttccctgttcacagcaccctcagggtcttaaggtcttcatgccctatcacaaatacctcttttatctgtccacccctcacagactaggaccctcaaataaagctgttttatatcaaaaaaaaaaaaaaaaaa

SEQ ID NO: 1871 - DNA, 842 bp, Homo sapiens
cccacgagccgtatcatccgagtccagatggagttgggggaagatggcagtgtctataagagcattttggtgacaagccaggacaaggctccaagtgtcatcagtcgtgtccttaagaaaaacaatcgtgactctgcagtggcttcagagtatgagctggtacagctgctaccaggggagcgagagctgactatcccagcctcggctaatgtattctaccccatggatggagcttcacacgatttcctcctgcggcagcggcgaaggtcctctactgctacacctggcgtcaccagtggcccgtctgcctcaggaactcctccgagtgagggaggagggggctcctttcccaggatcaaggccacagggaggaagattgcacgggcactgttctgaggaggaagcccctttttttacagaagtcatggtgttcataccagatgtgggtagccatcctgaatggtggcaattatatcacattgagacagaaattcagaaagggagccagccaccctggggcagtgaagtgccactggtttaccagacagctgagaaatccagccctgtcggaactggtgtcttataaccaagttggatacctgtgtatagcttgccaccttccatgagtgcagcacacaggtagtgctggaaaaacgcatcagtttctgattcttggccatatcctaacatgcaagggccaagcaaaggcttcaaggctctgagccccagggcagaggggaatggcaaaatgtaggtcctggcaggagctcttcttcccactctgggggtttctatcactgtgacaacactaagataataaaccaaaacactacctgaattct

SEQ ID NO: 1872 - DNA, 1904 bp, Homo sapiens
gcccgcgcgggatccgggtggctgcaggctgctggcttctgcggctgcggggtcggggtcgcggccagggccaagccgcagcgagttcacaggcggaacccctgcaggcggcgccccctacgcgaggtcacccctgggaaggagcgcagcccacccggcccctccgcatccgagcaggacgcccgtctcctctccctgaggatttcaggtctccctgtcccaggaggcttgtgccaagatggcatcagctggagacacccaggcaggcccacgggatgcagcagatcagaacttcgactatatgttcaaactgctactgataggcaacagcagtgtgggcaagacttccttcctgttccgatacgcggacgactccttcactcccgccttcgtcagtactgtgggcatcgatttcaaggtcaagaccgtctaccgccatgacaagaggatcaagctgcagatctgggacacagcgggccaggagcgctaccgcaccatcaccacggcctactaccggggagccatgggcttcctgctcatgtatgacatcgccaatcaggaatcctttgccgctgtgcaggactgggccacgcaaatcaagacctactcctgggacaacgcccaggtcatcctggtggggaacaagtgtgacctggaggacgaacgtgttgtgcctgctgaggatggccggaggctcgccgacgaccttggtttcgagttctttgaagccagtgccaaggagaacatcaatgtgaagcaggtcttcgagcgcctggtggatgtcatctgcgagaagatgaacgagtccctggaacccagctccagctcaggcagcaacgggaaaggcccggccgtgggggatgctccagccccccagcccagcagctgcagctgctagagatggcccccaaccccccacccacccctctcctgcctcggcagggactgtgatcgaggcgtgagccacagtggttatctccaagctcagggcaatcccttccctcctgtcaactgctccccgactcctgcatggctcattccttcacaatgtcgccgtggctgccaggttcctcaggcagccccggtgggaggctgcggaccatggggactcagctctgcatggcaggcagaggcccagggacactgacgtgcatgagcttgctgctttccagggtgtgttgagggtggccatgggtgacacgtcccactctttctgatggaggggcatccgtggtgccttctagcttagaaccattttccaggtctcttctgggttgggcaggactgatattcccaagctggtggaagatggttcatcttcctcgcacagtgtgggttcttggagttcatccagggaaggcggcgcctctttctcaggtcctgcaggctggtctctgagcctgcccccacgaactttctggattccaaggtgggatggtgatccctttgacccctgcagaccctctacttgcgaaaagcagcattgaagcagccttttcccattgtagaagggacagggagtcagatcccctcaaccccccggcttcagggaccccagaagtgccttccaagcttcccccaagatccacatcacccacgaccctgccactgtttttgctgtgttcaccacatctctgatcctgaagtgaattctggaactatggaccacattagactgggcagagattcgcccaacccctagcactccggctctgggctttcggccagaagttaattaacctcagagccaggagcctggggctggggcctccctcccaggccctgtttagctgtttagctggttgtgttttaagcaagttcttgcccaatcatgcatcctgctagaaaaggaaatgaagcaacgttcccagccaccgcaaaaaaaaaaaaaaaaaaaaaaaaaa

SEQ ID NO: 1873 - DNA, 4179 bp, Homo sapiens
agcgccaggcccggcgctcctcaagatggctgccgacagtgagcccgaatccgaggtatttgagatcacggacttcaccactgcctcggaatgggaaaggtttatttccaaagttgaagaagtcttgaatgactggaaactgattggaaactctttgggaaagccactcgaaaagggtatatttacttctggcacatgggaagagaaatcagatgaaatttcctttgctgacttcaagttctcagtcactcatcattatcttgtacaagagtccactgataaagaaggaaaggatgagttattagaggatgttgttccacaatctatgcaagatttgctgggtatgaataatgactttcctccaagagcacattgcctggtaagatggtatgggctacgtgagttcgtggtgattgcccctgctgcacacagtgacgctgttctcagcgaatctaagtgcaaccttcttctgagttctgtttctattgccttgggaaacactggctgtcaggtgccactctttgtgcaaattcaccacaaatggcgaagaatgtatgtaggagaatgtcaaggtcctggtgtacgaactgatttcgaaatggttcatcttagaaaagtgccaaatcagtacactcacttatcaggtctgctggatatcttcaaatcaaagattggatgtcctttaactccattgcctccagttagtattgctattcgatttacctatgtacttcaagattggcagcagtatttttggcctcagcaacctccagacatagatgcccttgtaggaggagaagttggaggcttggagtttggcaagttaccatttggtgcctgcgaagatcctattagtgaactccatttagctactacatggcctcatctgaccgaagggatcattgtggataatgatgtttattctgatttggatcctattcaagctccacattggtctgttagagttcgaaaagctgagaatcctcagtgtttgctaggtgattttgtcactgaattttttaaaatttgccgtcgaaaggagtcaactgatgagattcttggacgatctgcatttgaggaagaaggcaaagaaactgctgatataactcatgctttgtcaaaattgacagagccggcatcagttccaattcataaattatcagtttcaaatatggtacacactgcaaagaagaaaatccgaaaacacagaggtgtagaggagtcaccgctaaataatgatgttcttaatactattctcctgttcttattccctgatgctgtttctgagaaaccattagatggaactacttcaacagataataataatcctccatcagagagtgaagactataatctctacaatcagttcaagtctgcaccatctgacagtttaacatacaaactggctttgtgtctctgtatgatcaatttttaccatggagggttgaaaggagtggcacacctctggcaggaatttgttcttgaaatgcgtttccgatgggaaaacaactttctgattccaggattagcaagtggacccccagatctgaggtgttgtttactgcatcagaaactacagatgttaaattgttgtattgaaagaaagaaggcacgtgatgaggggaaaaagacaagtgcttcagatgtcactaatatatatccaggggatgctggaaaagcaggagaccagttggtgccagataatctaaaagaaacagataaggaaaagggagaggtaggaaaatcttgggattcctggagtgacagcgaagaagaattttttgaatgcctaagtgatactgaagaacttaaaggaaatggacaagagagtggcaagaaaggaggacctaaggagatggcaaatttaaggccggaaggacggctctatcagcatgggaaacttacactgctgcataatggagaacctctctacattccagtaacccaggaaccagcacctatgacagaagatctgctagaagagcagtctgaagttttagctaaattaggtacatcggcagagggggctcaccttcgagcacgcatgcagagtgcctgtctgctctcagatatggagtcttttaaggcagctaatccaggttgctccctggaagattttgtgaggtggtattcaccccgggattatattgaagaggaggtgattgatgaaaagggcaatgtggtgctgaaaggagaactgagtgcccggatgaagattccaagcaatatgtgggtagaagcctgggaaacagctaagccaattcctgctagaaggcaaaggagactctttgatgatacacgggaagcagaaaaggtgctgcactatctggcaatccagaaacctgcagaccttgctcggcacctgttaccttgtgtgattcatgcagctgtactcaaggtaaaggaagaagaaagtctcgaaaacatttcttcagttaagaagatcataaagcagataatatcccattccagtaaagttttgcacttccccaatccagaagacaagaaattggaagaaatcattcaccagattactaatgtggaagctctcattgccagagctcggtcactaaaagccaagtttggaactgagaaatgtgaacaggaggaggaaaaggaagatcttgaaaggtttgtgagttgcctgctggagcagcctgaagtgttagtcaccggtgcaggaagaggacatgctggcaggatcattcacaagctgtttgtgaatgcccagagggctgcagctatgactccaccagaggaggaattgaagagaatgggctccccagaggaaagaaggcagaactccgtgtcagacttcccaccccctgctggccgggaattcattttgcgcaccactgtgccgcgccctgctccctactccaaagctctgcctcagcggatgtacagtgttctcaccaaagaggactttagacttgcaggtgccttttcatcagatacttccttcttctgattcttctagcattactcgttggtggcttcagagacagtgctgcctcctcctgagggagggaaggtaccagggagaacctgggaggtcctggagagggccctgtccagttgggtgatcaggaatcaaaccagcatcggaaagacttcccagcaccaagcttgagctgtgtcgtttcgtggagggggcagcgaggatgggcttgagctgttgagagatttctgccctagagatggcctttgtatatgggggggtggtggggggacacaaacacatcagacactccgtcctcacactggcaggacggtgttcatcgcattctcttctgtgaccagcctctaggctagcggctgcattcgtggtctgtgcaaacacttcgtggttctatatatcagcagcaagtgtgcaaaataaaggacctgttaactcagatttctggatattttggtggtagcttctagtcccagaatctgtgtttttaaaatactacatgacattctgtctattcaatcacctggtggtcatctttcttgtactaattaactgttgatgagcattttggatattctaggagaaagcctataatttcacatagtttctctttttcatgtaactgtaacctaaatgtattacttctgataaaactatatatcaaatgtcactgcaaattagttttatatctgtcatgtgagatttgtcttacttatttttcttttggttgccatggaagttatggccctgaaaatcgtctccctccccttctcttgctgtacagcatgcgttctctttttgtggttgctggctgggtactgtatttaatgaagtagagaatagcacttgcaaaaatacagtcttggtacctagagactgtcatgcagatagtataatttggtatatgtgctaatgcattgagtagaggattattttaacacactattttgcttttgtattttagttaaaataatcgatggggatgtgtagcccccccgtgtgaggatgacatcaccacatttctagtttcatggagctcaagatgtcttgtgtctgtgtggctagatggcctctgcttggtaatcttatttttaggcctaaaattcccacttaaatccaaagtaaaaatggttatactgaagcataaaccttgcctgtgtaattttaaaaaattaatagagctgtgcaaaccctgttatttttgtaaaaaaaaaaaaaaa

SEQ ID NO: 1874 - DNA, 546 bp, Homo sapiens
atgtgcgtggtgcagcgcttcaagaccggcgccttctcggagcgccagggaagcaccatcggcgtcgacttcaccatgaagacgctggagatccagggcaagcgggtcaagctgcagatctgggacacggccggccaggagcggttccgcaccatcacccagagctactaccgcagtgccaatggggccatccttgcctacgacatcaccaagaggagctccttcctgtcggtgcctcactggattgaggatgtgaggaagtatgcgggctccaacattgtgcagctgctgatcgggaacaagtcagacctcagcgagcttcgggaggtctccttggctgaggcacagagcctggctgagcactatgacatcctgtgtgccattgagacgtctgccaaggactcgagcaacgtggaggaggccttcctgagggtggccacggagctcatcatgcggcacgggggccccttgttcagcgagaagagccccgaccacatccagctgaacagcaaggacatcggagaaggctggggctgcgggtgctga

SEQ ID NO: 1875 - DNA, 4453 bp, Homo sapiens
aggaccggccggagctttgcggagggcccggcttggcgggtccgggggggagccgaacccgcggggcaccgggtccgggcggggccgagccgggccggggcgggagccagccggggtggggcggggccgaggccgaggcaggcggtcggcagtgctgggggttcaggtgttgcggcggctccacgtagccaggcggcccgtgggctggagcgggcggagctcggcccgcggcttgcgtgagctcaggccggtcccagcgtccagagcgccggcccttcggcttcttctaggccatggcagggccgggcccaggcccgggggacccggacgagcagtacgatttcctgttcaagctggtgctggtgggcgacgcaagcgtgggcaagacgtgcgtggtgcagcgcttcaagaccggcgccttctcggagcgccagggaagcaccatcggcgtcgacttcaccatgaagacgctggagatccagggcaagcgggtcaagctgcagatctgggacacggccggccaggagcggttccgcaccatcacccagagctactaccgcagtgccaatggggccatccttgcctacgacatcaccaagaggagctccttcctgtcggtgcctcactggattgaggatgtgaggaagtatgcgggctccaacattgtgcagctgctgatcgggaacaagtcagacctcagcgagcttcgggaggtctccttggctgaggcacagagcctggctgagcactatgacatcctgtgtgccattgagacgtctgccaaggactcgagcaacgtggaggaggccttcctgagggtggccacggagctcatcatgcggcacgggggccccttgttcagcgagaagagccccgaccacatccagctgaacagcaaggacatcggagaaggctggggctgcgggtgctgaccaggggccgggccggcagactgggggttccccacctccttgctctccccagcctgccaagcccagccctccagagccagccctcctgggtaccggcaactacagcagccgggtgaagctctggagctctgcatcctgtggcctggctgcgggatggaggctctccttgaggaaggggaagcaggataccctggcgggccaccctgccagccagcagctggccctccaccatcttcacattccaagactggcctgaacccgccggtgtgggccacagtaggaggggccagcagtcctccctgtcccatgcctgctggctctgaccgtttcctctcatgggtttgctttacctgtggcagcaggttgctgctttccagggatgtgtccagtgccctgggttcttcccggtcatcctggggctctgcacagagcagcagagctagagccatgagacccacagacttggtgcctgagcgcagctccagggaagccccagccccttccaggcggggaacctgcttcctgccttcactgcccccgcagcactcacagacatctccctggggtctggctcactgccttatcaggacctctgagttttctgactttctgtgtagcttctcattttcatcagcacagcatggggtcacggcccacagctaggtggggtcacggcccacagctaggtggggactgtctgctggctcagggcccagtgttttgccactcaggttgcaaaattagctaatccttcagtgccagcactcagaagtctggcaggtgggggaatgagatgagaaagtggacatttaaggtccaagtagaagcttgcatccttgaggctcagggatgagagggcaccgcaaggcacccagccttaccccacaagcaggaatcctgccagccgagcgtgggtcccagtctatggaatcgagtctcccagacaaaaaaggagaggccctggcggtccttggcctggcccattttattccctggacccttaactgcctcaccctgagctgggcaccaaggttagaaggcaaaagtggggtagggggatgtgggaagcagcattgtcctctgggcatgtggctcagaggtatcacagtgacaaaagagccagggctagggctggaggggccaggtgatcttccttagccaatcccagtccgtctgtgtcagcccagctctgcctcgcagccccctcagcatgggtgcccccagaagtaagcagctcttggacccacgagcagggctgcgtcggtttgtggtctagctcccaggggcaggccaggcatggctcagtgcagtccctgggccagtgagaggcctcccccatgcctccctgccctctgcactaagcactttccaggcaggcctggccatagggcaagagcaggccttacagcagtgccacggtgacccaagaggcagggttggggcctggacagggtttcctctgctgagactgagacaagcagggcttgatgctggtggtggagccagcatctcacctgccaggcttccttttgggcagggaggctacctgtggaatggctgagcctggttctgcaggggaggaaggctgccaggagctgaggggctagcacctgcattgaggggagtctgggtgcatcagattggggggcgccagaggcgaggctgcctggctccctttctcagcagctttgcttgtggcaggggtgagagtggagctgagtggggtctgggctctgcccctgcgcctccactgcagtgcctgggctccccttgcagggcagacagtgcctggcactgaggggtgcccccagaccccgctgggactggatgtgccgtgggcagtgccttcctccagcctcacaacctttctgctggggctgaagtttctggggtcacatggtcagaaggggctgagctggtctttcactgcaggcccactctgaaagagaaatcccatgaagcctgtccttgcagagcccctctgtttttgggggaacagggagcattcacagggtcttgggaacaaaggcctgggcctccccgtttgaatttcagccccagttccagggcaagtcccagccacccaagcatacttaccagtactgcccaccaccacccactgcccacctctaagaagcccggctctcctactctgcttccaggctggggcctcacaggtggggctgttaccttcctcagggcttagggagggagggaggacatggacagggccttccaccctggctccttcacagggatggtagctgaccggtgatgggttcatttgtcaccttggactgtgagccacttccacttctcgccccccaggcaggagcaccctcactccaagggcttggcctggaaaggcaggctcacctgggactcaacgttccttcccccgccgccactgtgccccccgtccctccaccccagaagccctgacctcatttgggcaccttgctgtcctctgggcttctcctctgcccaggtcaccctgtggcaggcctgggccctcaggatgtttcaaaggctccacagctccaccgctccacctggcttcactccagcaccctgtccctggagcacctctgtcctgtctgggccaacctggtctccctgccccatgccctcccctggctcttagcaacctgcccttttattcatgccatttggggtcacagatgcctagctggacacagctcccagaactggctccaccctggggccttgcccctagtaccccctggcaggagcaacccaccccatggtcgaggttcccctacccctggatcctggactgaagccatttcctacagagaagcgttcccaccccctctcaggcacaaaagccggtgtccagggactcaagacctgtacctggggttgcaggggctcctgccctgctgtatcccaccaggagggggccccactgcccttccggcccttaaaactgggctgggagagaagacggggaagtgtgtgagacaaaacaaagccggcttgtttcctccccttggcaggctaagctctcccggcagcccgggctctggggcggaaggagaacagtgtcatctcttcctttgttgataaattgccaaagagtgggaacaggtggggtcaggggccagagtgcaggggagggggcaatggtggaggtggcggggggaagcagagggaggtgggctgaggcctcggtggggccagtgcgacgctggcttaaggagctggaggggttcctaatacacatttaattcagtttctcttccctaagaggctgccggagttggggcctcctccagcagagaccctcggacccctgcagggcctggacttggggtgaacagggcttcagtcagcgcaagtattccatttgcatttggtaatttttcatgccacctatttatgaatatataaatctttataccaaatctattttttaaaacatggaaaagttgcctttatggaaacttggcagagccagagtgtacacattcctaaaccattaaacagatttctataac

SEQ ID NO: 1876 - DNA, 3336 bp, Homo sapiens
ggagctgcagctgtttgtctgttcgacacaggcttggggccgacgggggagacggagccccaggagtgttgaagcctggaaatcccctccccttccccctcccccctttacagtatccccctccctccaccctttcccattctgataatctggccatgactagcagaagcacagctaggcccaatgggcaaccccaggccagcaaaatttgccagttcaaattggtcctgctgggagaatctgcagtgggaaagtcaagcctggtattacgttttgtcaaagggcagttccatgagtaccaggagagcaccattggagcggccttcctcacccagtccgtttgtctagatgacacaacagtgaagtttgagatctgggacacagctgggcaggagcgatatcacagcttagcccccatgtactacaggggtgcccaagctgcaatcgtggtttacgacattactaatcaggaaacctttgcccgagcaaagacatgggtgaaggaactacagcgacaggccagtcctagcatcgttattgccctggcagggaacaaagctgacctggccaacaaacgtatggtggagtatgaagaggcccaggcatatgcagatgacaacagcttattgttcatggagacttcagccaagacagctatgaacgtgaatgatctcttcctggcaatagctaagaagttgccaaagagtgaaccccagaatctgggaggtgcagcaggccgaagccggggtgtggatctccatgaacagtcccagcagaacaagagccagtgttgtagcaactgagggggtggctagcagcaaacaagtatggagctagcacaagagctaagaaataacctccatccctacccctcagcacacaacccctacggtaacagcacactgagccctggctcccaagggctgcctcctgacagctccgtcatggcactttttaacgcttcagcaacaaacaccaggcagctgttgccactggcctcctaccccctactctggggcttgggggtcaactccccccaggacttaccttccaaaacaaactttcttcactttgtattataggtacaagacagcgacttacgtatcttttctcctcctccctagtgttcctccccattttttcagaaaacacttctgactcctgtcccttccccttctgcttttggtcagtccctgttcttgagcctcttttctcctctccccaggatgcagaaagtggtgaacccaggaactgaggaaggaggtttccagttcatttacattaagggccctgggggagaataaagctcagagcaggagggagtaaggaaacatttcctttttgtttttatttggttggagtttctcatatttgaaaacattgcggtatccatgatttggccttgtggagggtgttcctaggtagaggtgagaatggggaggcaagatctcaggcaccaggcaggaggtgccttgtaagctaactgggcggaggtggaggtgcagtgtcaactgtggctctgtaactcttcaaaggcccagtttcccctcacgcagcctcttaggtagcgtttcccctaatcgtgggggttggaccccagagtcttccaaagaattttcactggttgcctgcatctttggctctgctgtgatctgattggaggagggacagtttctggtacccatcctctgatttatacatatgcattttttcccctctggcctttagatggcctcagccccagccaccatatacccctgcagtttgcactttaattgatggtagttcagttggggtacttgttttatggaagttttgattgatttacttgccctcccaccttctttttaattcaatgaaatctgaggttaatgcgaggttcgaggagaggttatagataaaactaccagtggcagctactcaagtcctatctccactgttagcttcctccaactctaattattaacctatattcttgccaagctaactattgactataggtttgcctttcctggagaattaattgagcaattgaggagtgtctcaggatagcacaggccaaggtaggggagtaaaaaggaggtcaggcaaaagggaggagttttctgtcctttcccaggtttcacactcaatttgatatccattaccatgtcttttctacttccttgtaaataggtatgatctttattcccactgtacagtctgttctatcctctgcctcccatcaggccctgtttctttgttcctttgttaatatcttgaatttagtccctccatccttaatccccccatccctccccatcatgcaaccagtggtttaatccatgtaccaataggggctagtaccacagaggcctcctgtggtgccctcgtatcataccacctgttcctgtggagagggaatgaccggcactgaaggtaccttacaactggctcatattatcagaggaccttggtcctttctaaatctctagtctctcttcatatccttcatcaggtgttttaagatgtctctgagaagccatcaaggcaaaagagaactttaagttccttgttccagcccggagttttgggaaagaaagaaaggaaaggtcacagtgacctaggattggaaccttcctgcccttttggcttgcagactgccttctatcccagaacagctgagaaatctatgaagctgagattctgaaggacccagcttaggttcttccacttaggcctcaattcccttccttttccaggggcagccttagttcccatggccctgaaacacacacatttcccccttcctttcccagaagccactggccccccatagcacccagtgcatcctttttacaagtggaagaactaggatggctttccaaagtcttctagaaatgaagttctttctctgtgcagctttcccccttggagcaggagtgaagatgtttcattatcttgggcctgggaaaccacttccccaggcttctccctccccccacccccataggaacaggatttggccttagcttctgggcctatcggctgccttccctctacttcctaccacctcttctgccttcctttgagctctgttgggcttggggatcttagttttcttttgtttatttcccagctcatttttttcttctggtcagtttttttaagggggggtgttgtggttttttgtttttgttttgcttctgagaaagcatttgcctttcttcctctcccaacataacaatcgtggtaacagaatgcgactgctgatttaccgatgtatttaatgtaagtaaaaaaaggaaaaaaagaaaaaaaaaaaaaaaaaaaaaaaaaaaaaaaaaaaaaaaaaaa

SEQ ID NO: 1877 - DNA, 6893 bp, Homo sapiens
gtgctgtggcggcggcggcggcggtagtggcggcggcggcggtgcctgggcggcagcagcagcagtagcggcagccctgaggacgatatggtgtaagatacttcttcaagattggacagctggggaccttcttctgattaaccttaaaccaacttgtagccatagagacacctcacaaggttcccatttttgttgttgttgttgttgattttctgctcacacctttcctgaccttgcaaccatgtatggaagtgcccgctctgttgggaaggtggagccgagcagccagagccctgggcgttcacccaggcttccacgttcccctcgcttgggtcaccgtcgaaccaacagtacgggagggagttcgggaagcagtgttggaggtggcagtgggaaaaccctttcaatggaaaatatacaatctttaaatgctgcctatgccacctctggccctatgtatctaagtgaccatgaaaatgtgggttcagaaacacctaaaagcaccatgacacttggccgttctgggggacgtctgccttacggtgttcggatgactgctatgggtagtagccccaatatagctagcagtggggttgctagtgacaccatagcatttggagagcatcacctccctcctgtgagtatggcatccactgtacctcactcccttcgtcaggcgagagataacacaatcatggatctgcagacacagctgaaggaagtattaagagaaaatgatctcttgcggaaggatgtggaagtaaaggagagcaaattgagttcttcaatgaatagcatcaagaccttctggagcccagagctgaagaaggaacgagccctgagaaaagatgaagcttccaaaatcaccatttggaaggaacagtacagagttgtacaggaggaaaaccagcacatgcagatgacaatccaggctctccaggatgaattgcggatccagagggacctgaatcagctgtttcagcaggatagtagcagcaggactggcgaaccttgtgtagcagagctgacagaggagaactttcagaggcttcatgctgagcatgagcggcaggccaaagagctgtttcttcttcgaaagacattggaggaaatggagctgcgtattgagactcaaaagcagaccctaaatgctcgggatgaatccattaagaagcttctggaaatgttgcagagcaaaggactttctgccaaggctaccgaggaagaccatgagagaacaagacgactggcagaggcagagatgcacgttcatcacctagaaagccttttggagcagaaggaaaaagagaacagtatgttgagagaggagatgcatcgaaggtttgagaatgctcctgattctgccaaaacaaaagctctgcaaactgttattgagatgaaggattcaaaaatttcctctatggagcgtgggcttcgagacctggaagaggaaattcagatgctgaaatcgaatggtgctttgagtactgaggaaagggaagaagaaatgaagcaaatggaagtgtatcggagccattctaaatttatgaaaaataaggtagaacaactgaaggaggaactaagttcgaaagaggctcaatgggaggagctgaaaaagaaagcggctggtcttcaggctgagattggccaggtgaaacaggagctgtccagaaaggacacagaactactcgccctgcagacaaagctagaaacactcacaaaccagttctcagatagtaaacagcacattgaagtgttgaaggagtccttgactgctaaggagcagagggctgccatcctgcagactgaggtggatgctctccgattgcgtttggaagagaaggaaaccatgttgaataaaaagacaaaacaaattcaggatatggctgaagagaaggggacacaagctggagagatacatgacctcaaggacatgttggatgtgaaggagcggaaggttaatgttcttcagaagaagattgaaaatcttcaagagcagcttagagacaaggaaaagcagatgagcagcttgaaagaacgggtcaaatccttgcaggctgacaccaccaacactgacactgccttgacaactttggaggaggcccttgcagagaaagagcggacaattgaacgcttaaaggagcagagggacagagatgagcgagagaagcaagaggaaattgataactacaaaaaagatcttaaagacttgaaggaaaaagtcagcctgttgcaaggcgacctttcagagaaagaggcttcacttttggatctgaaagagcatgcttcttctctggcatcctcaggactgaaaaaggactcacggcttaagacactagagattgctttggagcagaagaaggaggagtgtctgaaaatggaatcacaattgaaaaaggcacatgaggcagcattggaagccagagccagtccagagatgagtgaccgaatacagcacttggagagagagatcaccaggtacaaagatgaatctagcaaggcccaggcagaagttgatcgactcttagaaatcttgaaggaggtggaaaatgagaagaatgacaaagataagaagatagctgagttggaaaggcaagtgaaagaccagaataagaaggtagcaaatctgaagcacaaggaacaggtggaaaaaaagaagagtgcacaaatgttagaggaggcgcgacgacgggaggacaatctcaacgacagctctcagcagctacaggacagtctccgtaagaaggatgacaggattgaagagctggaagaagcactaagagaaagtgtacagataactgcagagcgggaaatggtgctagcacaagaggaatcagccaggaccaatgctgaaaaacaggtggaggagttactgatggccatggagaaggtaaagcaggaactagaatccatgaaagcaaagctgtcctccacccagcagtctctggcagaaaaggaaactcacttgactaatcttcgggcagagagaaggaaacacttagaggaagttctggagatgaagcaagaagctcttctggctgccattagtgaaaaagacgccaatatagctctcttggagctttcgtcctctaagaagaagacccaagaggaagtggctgccctgaagcgggagaaggatcgtctggtacagcagcttaagcagcagacgcaaaatcgaatgaagctaatggccgacaactacgaggatgaccacttcaaatcctcccattccaatcaaacaaatcacaagccctccccagaccagatcatccagcccctcttagaacttgaccaaaatagaagtaaattaaagttgtacattggacacctgacaaccctctgccatgaccgagaccccctgatcctccgtggactcactccaccagcttcctataacttggacgatgaccaggcggcttgggagaatgagctgcagaagatgacccgggggcagcttcaggatgagttagagaaaggtgaacgggacaatgcagaactgcaggagtttgccaacgccattcttcagcagatagcagaccattgtcccgacatcctagagcaagtggtcaacgccctggaagagtcctcttgaccctgctttatggggaagcctgaggtagtcaacccaggagccaagaaaagagaactacgaggaacaggtgcccggaaccttcttggcaccaaacactacaaacttcatcccaacttgctcacttgaagaagtgtgattccagcaccgtttctacatctgccatcttactctgcctttctgctttggatgtggtctctacactaaccttcttgatgtccagggtagataaagggtcgaatctctctgaagaactgccacctggtcatcagcagtggagaactgtgggagctggtggctctgccctgacagagagccatggagcagaggagcctctcacctcctgtcctctgacatgagaatgaaaccaggaatggacttggagttcaacaggctgagaggatgcctccaatggaccagagagctgagtgttctaatatcacaataggtgctttctcctaaaagggcaaaaaacaatctcaaaaagattagaaaaagagaaggggggaagggaagagaaaatcgactcttctttttactgtctcttctgcttactttccacatgagatgctttgtaccggggagctgtgagcaggcctcacgatggcttgggagcactcgttctcccaaggtctgagtcttcatccagccctgcctgtctgtcgcagccttcctcactctgttcctcggccagttaacaagaagatggtgtgaggtgttctccaccagtctctcctgtttgagactgttgacgttatcatactgaggtgttagatcaaatatctctaattgaagaacatgtgaggttgaaagagcaccagccagggcaacatagcgtgaccctgtctctacaaaaaattaaaaagagaacatacaaagttgacatatgagaccctgttgtccccgcctgcagctttgccccagtaacagatgcccgttgctcttgggctggtttcccctgaacacctccaagaggctgcctgccttgccagcacccgtgtcctgagctcctgcagcccagtggctgctgaagttgtgatccctcactcaccctgctagctttgcccttgactcgtcttctctgaacctcagcctcgtgcattgcctggaaccttcttctagcataaatgaaggtttttcctcctacacacattccttcctcggttatttcattcagagaatatttatgaaatgcctactgtgtgcaagtcatccatccttgaaaaggccacttctcagtgagggagagatgtagtggattctgtgagacatacctgctggagttgaagcagtaaatagcatgtccttcccctccccgatcttaaggtgtgttttctagaaaagttccctaatggaattcatgagtttgggggtctcagtcacccgcttgcctgtaggattccatttgatgattctggatttttgctgtttgttattgcccttagaggggctctgagtatctacttgtgggtggccatttcctgacatctgcatgtacctcgtggaattcagccagcttcatgttgcaaatcagaaagctgaccccaagactgcaaatcaatgaaggtattggcattgttaaggacgtagcgtagacaacagcagtcataaataattaggcaggaacttaacccaaatctagttctttgaccacctctaccaccagaacccagcagacactcacatctcctgataagagttgctggactcgatgtttttgttttgcattttctcctctccttccccacttactcagagaatttaaagtctgtagagtcagcacagccccatcagtccaggaacttcccaccaccagcccttgactgtcccattaactgacatggtcagatttccagctccccctactccctgctgtgaaacaatccctctccctgtgagaggaaactgtggagcgtttcttatcgaaggttaaatggactctgctcataaacctcttactgagatgcttcctgatagccaggctggccagagaggggtgcaggggttagatagtaagtggtggtcgtttgtggtcagttacctcaattctgttcattgcagtgcccgtaaaccatgtagaaagctcccagcactgaaaggcaggagtgttagcatctcgctttatccaccataacgtaaagaactgcggtgtgataacagccttcacggggccacggtggaaccaagacagcaggcgaggccatgcctaaacaagtggtctggcacgggcactggccagctgctctctccaagcaggtggcccagatcccacccacgtggactttctcatcaggtgcagcgcctgccactctcagccactgggtgtgtgactctcctcttcatctcagcattctccatcacttcccctccagaaaaacggatggaaggaagccctctgtgacactgcttctgagaagaagcatttccgggaccgatatcatctgtctggtctctgtgaacagcaaggaatcttcttgaccgttcttgggcactggaggctggctaggagttcagtaataaacgtggccttcgtgctgtagggcagagtggatgcagtttgtagctttcagagtgtctcattgagtctagatcattgaaccaacacttaaccaaatgtcccactcccatcacactaggacttgtcattccatgcccctctcctagtggtcatggtttcatatgggcatacaactgctactgaagttatatagccttgaaaactcagtgcaggttgcccttaattttccccaaacccctccatcggcaagtctagttgccctttagcacctaaagatctgcaccccaaaccaatgtcaccataaagagggcacgaagaagagtgggtgtgatcccaacggggttttgtaactgaagaagcccagtgtgagcttctcatcttttcatatacctctaacccccggtactcattgaatcattgatgaggtatctcaattgagatttgcaaggactttgataccatttgaaatggaaaaattttgaacgggctttaacatgtttaagaaatatggatggggccggccacagtggctcacgcctgtaatcccagaactctggaaggctgaggcaggcggatcacctgagatcaggagttcgaggccagcctggccaagatggcaaaaaccccgactctactaaaaatacaaaattagccaggcgtggtggcgtacgcctgtaatcccagctactcaggaggcaggagaatcgcttgagcctgggaggcagaggctgcggtgagccgagatcgtgtcactgcactccagcctgggtgacagagactccattt

SEQ ID NO: 1878 - DNA, 6919 bp, Homo sapiens
gtgctgtggcggcggcggcggcggtagtggcggcggcggcggtgcctgggcggcagcagcagcagtagcggcagccctgaggacggtgagacggccgcggcggcggcgacagcgcggaagtcgcgcgggacccagagcttcccccctgtcgctagtgctgaggctttcgcctttcctacccagcttcttgctcacggcccgggctgggctgggcagggcaacgcgcccccggggaggggcggagctgtagatatggtgtaagatacttcttcaagattggacagctggggaccttcttctgattaaccttaaaccaacttgtagccatagagacacctcacaaggttcccatttttgttgttgttgttgttgattttctgctcacacctttcctgaccttgcaaccatgtatggaagtgcccgctctgttgggaaggtggagccgagcagccagagccctgggcgttcacccaggcttccacgttcccctcgcttgggtcaccgtcgaaccaacagtacgggagggagttcgggaagcagtgttggaggtggcagtgggaaaaccctttcaatggaaaatatacaatctttaaatgctgcctatgccacctctggccctatgtatctaagtgaccatgaaaatgtgggttcagaaacacctaaaagcaccatgacacttggccgttctgggggacgtctgccttacggtgttcggatgactgctatgggtagtagccccaatatagctagcagtggggttgctagtgacaccatagcatttggagagcatcacctccctcctgtgagtatggcatccactgtacctcactcccttcgtcaggcgagagataacacaatcatggatctgcagacacagctgaaggaagtattaagagaaaatgatctcttgcggaaggatgtggaagtaaaggagagcaaattgagttcttcaatgaatagcatcaagaccttctggagcccagagctgaagaaggaacgagccctgagaaaagatgaagcttccaaaatcaccatttggaaggaacagtacagagttgtacaggaggaaaaccagcacatgcagatgacaatccaggctctccaggatgaattgcggatccagagggacctgaatcagctgtttcagcaggatagtagcagcaggactggcgaaccttgtgtagcagagctgacagaggagaactttcagaggcttcatgctgagcatgagcggcaggccaaagagctgtttcttcttcgaaagacattggaggaaatggagctgcgtattgagactcaaaagcagaccctaaatgctcgggatgaatccattaagaagcttctggaaatgttgcagagcaaaggactttctgccaaggctaccgaggaagaccatgagagaacaagacgactggcagaggcagagatgcacgttcatcacctagaaagccttttggagcagaaggaaaaagagaacagtatgttgagagaggagatgcatcgaaggtttgagaatgctcctgattctgccaaaacaaaagctctgcaaactgttattgagatgaaggattcaaaaatttcctctatggagcgtgggcttcgagacctggaagaggaaattcagatgctgaaatcgaatggtgctttgagtactgaggaaagggaagaagaaatgaagcaaatggaagtgtatcggagccattctaaatttatgaaaaataagattggccaggtgaaacaggagctgtccagaaaggacacagaactactcgccctgcagacaaagctagaaacactcacaaaccagttctcagatagtaaacagcacattgaagtgttgaaggagtccttgactgctaaggagcagagggctgccatcctgcagactgaggtggatgctctccgattgcgtttggaagagaaggaaaccatgttgaataaaaagacaaaacaaattcaggatatggctgaagagaaggggacacaagctggagagatacatgacctcaaggacatgttggatgtgaaggagcggaaggttaatgttcttcagaagaagattgaaaatcttcaagagcagcttagagacaaggaaaagcagatgagcagcttgaaagaacgggtcaaatccttgcaggctgacaccaccaacactgacactgccttgacaactttggaggaggcccttgcagagaaagagcggacaattgaacgcttaaaggagcagagggacagagatgagcgagagaagcaagaggaaattgataactacaaaaaagatcttaaagacttgaaggaaaaagtcagcctgttgcaaggcgacctttcagagaaagaggcttcacttttggatctgaaagagcatgcttcttctctggcatcctcaggactgaaaaaggactcacggcttaagacactagagattgctttggagcagaagaaggaggagtgtctgaaaatggaatcacaattgaaaaaggcacatgaggcagcattggaagccagagccagtccagagatgagtgaccgaatacagcacttggagagagagatcaccaggtacaaagatgaatctagcaaggcccaggcagaagttgatcgactcttagaaatcttgaaggaggtggaaaatgagaagaatgacaaagataagaagatagctgagttggaaagtctcacctcaaggcaagtgaaagaccagaataagaaggtagcaaatctgaagcacaaggaacaggtggaaaaaaagaagagtgcacaaatgttagaggaggcgcgacgacgggaggacaatctcaacgacagctctcagcagctacaggtggaggagttactgatggccatggagaaggtaaagcaggaactagaatccatgaaagcaaagctgtcctccacccagcagtctctggcagaaaaggaaactcacttgactaatcttcgggcagagagaaggaaacacttagaggaagttctggagatgaagcaagaagctcttctggctgccattagtgaaaaagacgccaatatagctctcttggagctttcgtcctctaagaagaagacccaagaggaagtggctgccctgaagcgggagaaggatcgtctggtacagcagcttaagcagcagacgcaaaatcgaatgaagctaatggccgacaactacgaggatgaccacttcaaatcctcccattccaatcaaacaaatcacaagccctccccagaccaggatgaggaggagggtatatgggcatagccaatcagaggcttagttcagccattttgttcagaacgatcatccagcccctcttagaacttgaccaaaatagaagtaaattaaagttgtacattggacacctgacaaccctctgccatgaccgagaccccctgatcctccgtggactcactccaccagcttcctataacttggacgatgaccaggcggcttgggagaatgagctgcagaagatgacccgggggcagcttcaggatgagttagagaaaggtgaacgggacaatgcagaactgcaggagtttgccaacgccattcttcagcagatagcagaccattgtcccgacatcctagagcaagtggtcaacgccctggaagagtcctcttgaccctgctttatggggaagcctgaggtagtcaacccaggagccaagaaaagagaactacgaggaacaggtgcccggaaccttcttggcaccaaacactacaaacttcatcccaacttgctcacttgaagaagtgtgattccagcaccgtttctacatctgccatcttactctgcctttctgctttggatgtggtctctacactaaccttcttgatgtccagggtagataaagggtcgaatctctctgaagaactgccacctggtcatcagcagtggagaactgtgggagctggtggctctgccctgacagagagccatggagcagaggagcctctcacctcctgtcctctgacatgagaatgaaaccaggaatggacttggagttcaacaggctgagaggatgcctccaatggaccagagagctgagtgttctaatatcacaataggtgctttctcctaaaagggcaaaaaacaatctcaaaaagattagaaaaagagaaggggggaagggaagagaaaatcgactcttctttttactgtctcttctgcttactttccacatgagatgctttgtaccggggagctgtgagcaggcctcacgatggcttgggagcactcgttctcccaaggtctgagtcttcatccagccctgcctgtctgtcgcagccttcctcactctgttcctcggccagttaacaagaagatggtgtgaggtgttctccaccagtctctcctgtttgagactgttgacgttatcatactgaggtgttagatcaaatatctctaattgaagaacatgtgaggttgaaagagcaccagccagggcaacatagcgtgaccctgtctctacaaaaaattaaaaagagaacatacaaagttgacatatgagaccctgttgtccccgcctgcagctttgccccagtaacagatgcccgttgctcttgggctggtttcccctgaacacctccaagaggctgcctgccttgccagcacccgtgtcctgagctcctgcagcccagtggctgctgaagttgtgatccctcactcaccctgctagctttgcccttgactcgtcttctctgaacctcagcctcgtgcattgcctggaaccttcttctagcataaatgaaggtttttcctcctacacacattccttcctcggttatttcattcagagaatatttatgaaatgcctactgtgtgcaagtcatccatccttgaaaaggccacttctcagtgagggagagatgtagtggattctgtgagacatacctgctggagttgaagcagtaaatagcatgtccttcccctccccgatcttaaggtgtgttttctagaaaagttccctaatggaattcatgagtttgggggtctcagtcacccgcttgcctgtaggattccatttgatgattctggatttttgctgtttgttattgcccttagaggggctctgagtatctacttgtgggtggccatttcctgacatctgcatgtacctcgtggaattcagccagcttcatgttgcaaatcagaaagctgaccccaagactgcaaatcaatgaaggtattggcattgttaaggacgtagcgtagacaacagcagtcataaataattaggcaggaacttaacccaaatctagttctttgaccacctctaccaccagaacccagcagacactcacatctcctgataagagttgctggactcgatgtttttgttttgcattttctcctctccttccccacttactcagagaatttaaagtctgtagagtcagcacagccccatcagtccaggaacttcccaccaccagcccttgactgtcccattaactgacatggtcagatttccagctccccctactccctgctgtgaaacaatccctctccctgtgagaggaaactgtggagcgtttcttatcgaaggttaaatggactctgctcataaacctcttactgagatgcttcctgatagccaggctggccagagaggggtgcaggggttagatagtaagtggtggtcgtttgtggtcagttacctcaattctgttcattgcagtgcccgtaaaccatgtagaaagctcccagcactgaaaggcaggagtgttagcatctcgctttatccaccataacgtaaagaactgcggtgtgataacagccttcacggggccacggtggaaccaagacagcaggcgaggccatgcctaaacaagtggtctggcacgggcactggccagctgctctctccaagcaggtggcccagatcccacccacgtggactttctcatcaggtgcagcgcctgccactctcagccactgggtgtgtgactctcctcttcatctcagcattctccatcacttcccctccagaaaaacggatggaaggaagccctctgtgacactgcttctgagaagaagcatttccgggaccgatatcatctgtctggtctctgtgaacagcaaggaatcttcttgaccgttcttgggcactggaggctggctaggagttcagtaataaacgtggccttcgtgctgtagggcagagtggatgcagtttgtagctttcagagtgtctcattgagtctagatcattgaaccaacacttaaccaaatgtcccactcccatcacactaggacttgtcattccatgcccctctcctagtggtcatggtttcatatgggcatacaactgctactgaagttatatagccttgaaaactcagtgcaggttgcccttaattttccccaaacccctccatcggcaagtctagttgccctttagcacctaaagatctgcaccccaaaccaatgtcaccataaagagggcacgaagaagagtgggtgtgatcccaacggggttttgtaactgaagaagcccagtgtgagcttctcatcttttcatatacctctaacccccggtactcattgaatcattgatgaggtatctcaattgagatttgcaaggactttgataccatttgaaatggaaaaattttgaacgggctttaacatgtttaagaaatatggatggggccggccacagtggctcacgcctgtaatcccagaactctggaaggctgaggcaggcggatcacctgagatcaggagttcgaggccagcctggccaagatggcaaaaaccccgactctactaaaaatacaaaattagccaggcgtggtggcgtacgcctgtaatcccagctactcaggaggcaggagaatcgcttgagcctgggaggcagaggctgcggtgagccgagatcgtgtcactgcactccagcctgggtgacagagactccattt

SEQ ID NO: 1879 - DNA, 6809 bp, Homo sapiens
gtgctgtggcggcggcggcggcggtagtggcggcggcggcggtgcctgggcggcagcagcagcagtagcggcagccctgaggacgatatggtgtaagatacttcttcaagattggacagctggggaccttcttctgattaaccttaaaccaacttgtagccatagagacacctcacaaggttcccatttttgttgttgttgttgttgattttctgctcacacctttcctgaccttgcaaccatgtatggaagtgcccgctctgttgggaaggtggagccgagcagccagagccctgggcgttcacccaggcttccacgttcccctcgcttgggtcaccgtcgaaccaacagtacgggagggagttcgggaagcagtgttggaggtggcagtgggaaaaccctttcaatggaaaatatacaatctttaaatgctgcctatgccacctctggccctatgtatctaagtgaccatgaaaatgtgggttcagaaacacctaaaagcaccatgacacttggccgttctgggggacgtctgccttacggtgttcggatgactgctatgggtagtagccccaatatagctagcagtggggttgctagtgacaccatagcatttggagagcatcacctccctcctgtgagtatggcatccactgtacctcactcccttcgtcaggcgagagataacacaatcatggatctgcagacacagctgaaggaagtattaagagaaaatgatctcttgcggaaggatgtggaagtaaaggagagcaaattgagttcttcaatgaatagcatcaagaccttctggagcccagagctgaagaaggaacgagccctgagaaaagatgaagcttccaaaatcaccatttggaaggaacagtacagagttgtacaggaggaaaaccagcacatgcagatgacaatccaggctctccaggatgaattgcggatccagagggacctgaatcagctgtttcagcaggatagtagcagcaggactggcgaaccttgtgtagcagagctgacagaggagaactttcagaggcttcatgctgagcatgagcggcaggccaaagagctgtttcttcttcgaaagacattggaggaaatggagctgcgtattgagactcaaaagcagaccctaaatgctcgggatgaatccattaagaagcttctggaaatgttgcagagcaaaggactttctgccaaggctaccgaggaagaccatgagagaacaagacgactggcagaggcagagatgcacgttcatcacctagaaagccttttggagcagaaggaaaaagagaacagtatgttgagagaggagatgcatcgaaggtttgagaatgctcctgattctgccaaaacaaaagctctgcaaactgttattgagatgaaggattcaaaaatttcctctatggagcgtgggcttcgagacctggaagaggaaattcagatgctgaaatcgaatggtgctttgagtactgaggaaagggaagaagaaatgaagcaaatggaagtgtatcggagccattctaaatttatgaaaaataagattggccaggtgaaacaggagctgtccagaaaggacacagaactactcgccctgcagacaaagctagaaacactcacaaaccagttctcagatagtaaacagcacattgaagtgttgaaggagtccttgactgctaaggagcagagggctgccatcctgcagactgaggtggatgctctccgattgcgtttggaagagaaggaaaccatgttgaataaaaagacaaaacaaattcaggatatggctgaagagaaggggacacaagctggagagatacatgacctcaaggacatgttggatgtgaaggagcggaaggttaatgttcttcagaagaagattgaaaatcttcaagagcagcttagagacaaggaaaagcagatgagcagcttgaaagaacgggtcaaatccttgcaggctgacaccaccaacactgacactgccttgacaactttggaggaggcccttgcagagaaagagcggacaattgaacgcttaaaggagcagagggacagagatgagcgagagaagcaagaggaaattgataactacaaaaaagatcttaaagacttgaaggaaaaagtcagcctgttgcaaggcgacctttcagagaaagaggcttcacttttggatctgaaagagcatgcttcttctctggcatcctcaggactgaaaaaggactcacggcttaagacactagagattgctttggagcagaagaaggaggagtgtctgaaaatggaatcacaattgaaaaaggcacatgaggcagcattggaagccagagccagtccagagatgagtgaccgaatacagcacttggagagagagatcaccaggtacaaagatgaatctagcaaggcccaggcagaagttgatcgactcttagaaatcttgaaggaggtggaaaatgagaagaatgacaaagataagaagatagctgagttggaaaggcaagtgaaagaccagaataagaaggtagcaaatctgaagcacaaggaacaggtggaaaaaaagaagagtgcacaaatgttagaggaggcgcgacgacgggaggacaatctcaacgacagctctcagcagctacaggacagtctccgtaagaaggatgacaggattgaagagctggaagaagcactaagagaaagtgtacagataactgcagagcgggaaatggtgctagcacaagaggaatcagccaggaccaatgctgaaaaacaggtggaggagttactgatggccatggagaaggtaaagcaggaactagaatccatgaaagcaaagctgtcctccacccagcagtctctggcagaaaaggaaactcacttgactaatcttcgggcagagagaaggaaacacttagaggaagttctggagatgaagcaagaagctcttctggctgccattagtgaaaaagacgccaatatagctctcttggagctttcgtcctctaagaagaagacccaagaggaagtggctgccctgaagcgggagaaggatcgtctggtacagcagcttaagcagcagacgcaaaatcgaatgaagctaatggccgacaactacgaggatgaccacttcaaatcctcccattccaatcaaacaaatcacaagccctccccagaccagatcatccagcccctcttagaacttgaccaaaatagaagtaaattaaagttgtacattggacacctgacaaccctctgccatgaccgagaccccctgatcctccgtggactcactccaccagcttcctataacttggacgatgaccaggcggcttgggagaatgagctgcagaagatgacccgggggcagcttcaggatgagttagagaaaggtgaacgggacaatgcagaactgcaggagtttgccaacgccattcttcagcagatagcagaccattgtcccgacatcctagagcaagtggtcaacgccctggaagagtcctcttgaccctgctttatggggaagcctgaggtagtcaacccaggagccaagaaaagagaactacgaggaacaggtgcccggaaccttcttggcaccaaacactacaaacttcatcccaacttgctcacttgaagaagtgtgattccagcaccgtttctacatctgccatcttactctgcctttctgctttggatgtggtctctacactaaccttcttgatgtccagggtagataaagggtcgaatctctctgaagaactgccacctggtcatcagcagtggagaactgtgggagctggtggctctgccctgacagagagccatggagcagaggagcctctcacctcctgtcctctgacatgagaatgaaaccaggaatggacttggagttcaacaggctgagaggatgcctccaatggaccagagagctgagtgttctaatatcacaataggtgctttctcctaaaagggcaaaaaacaatctcaaaaagattagaaaaagagaaggggggaagggaagagaaaatcgactcttctttttactgtctcttctgcttactttccacatgagatgctttgtaccggggagctgtgagcaggcctcacgatggcttgggagcactcgttctcccaaggtctgagtcttcatccagccctgcctgtctgtcgcagccttcctcactctgttcctcggccagttaacaagaagatggtgtgaggtgttctccaccagtctctcctgtttgagactgttgacgttatcatactgaggtgttagatcaaatatctctaattgaagaacatgtgaggttgaaagagcaccagccagggcaacatagcgtgaccctgtctctacaaaaaattaaaaagagaacatacaaagttgacatatgagaccctgttgtccccgcctgcagctttgccccagtaacagatgcccgttgctcttgggctggtttcccctgaacacctccaagaggctgcctgccttgccagcacccgtgtcctgagctcctgcagcccagtggctgctgaagttgtgatccctcactcaccctgctagctttgcccttgactcgtcttctctgaacctcagcctcgtgcattgcctggaaccttcttctagcataaatgaaggtttttcctcctacacacattccttcctcggttatttcattcagagaatatttatgaaatgcctactgtgtgcaagtcatccatccttgaaaaggccacttctcagtgagggagagatgtagtggattctgtgagacatacctgctggagttgaagcagtaaatagcatgtccttcccctccccgatcttaaggtgtgttttctagaaaagttccctaatggaattcatgagtttgggggtctcagtcacccgcttgcctgtaggattccatttgatgattctggatttttgctgtttgttattgcccttagaggggctctgagtatctacttgtgggtggccatttcctgacatctgcatgtacctcgtggaattcagccagcttcatgttgcaaatcagaaagctgaccccaagactgcaaatcaatgaaggtattggcattgttaaggacgtagcgtagacaacagcagtcataaataattaggcaggaacttaacccaaatctagttctttgaccacctctaccaccagaacccagcagacactcacatctcctgataagagttgctggactcgatgtttttgttttgcattttctcctctccttccccacttactcagagaatttaaagtctgtagagtcagcacagccccatcagtccaggaacttcccaccaccagcccttgactgtcccattaactgacatggtcagatttccagctccccctactccctgctgtgaaacaatccctctccctgtgagaggaaactgtggagcgtttcttatcgaaggttaaatggactctgctcataaacctcttactgagatgcttcctgatagccaggctggccagagaggggtgcaggggttagatagtaagtggtggtcgtttgtggtcagttacctcaattctgttcattgcagtgcccgtaaaccatgtagaaagctcccagcactgaaaggcaggagtgttagcatctcgctttatccaccataacgtaaagaactgcggtgtgataacagccttcacggggccacggtggaaccaagacagcaggcgaggccatgcctaaacaagtggtctggcacgggcactggccagctgctctctccaagcaggtggcccagatcccacccacgtggactttctcatcaggtgcagcgcctgccactctcagccactgggtgtgtgactctcctcttcatctcagcattctccatcacttcccctccagaaaaacggatggaaggaagccctctgtgacactgcttctgagaagaagcatttccgggaccgatatcatctgtctggtctctgtgaacagcaaggaatcttcttgaccgttcttgggcactggaggctggctaggagttcagtaataaacgtggccttcgtgctgtagggcagagtggatgcagtttgtagctttcagagtgtctcattgagtctagatcattgaaccaacacttaaccaaatgtcccactcccatcacactaggacttgtcattccatgcccctctcctagtggtcatggtttcatatgggcatacaactgctactgaagttatatagccttgaaaactcagtgcaggttgcccttaattttccccaaacccctccatcggcaagtctagttgccctttagcacctaaagatctgcaccccaaaccaatgtcaccataaagagggcacgaagaagagtgggtgtgatcccaacggggttttgtaactgaagaagcccagtgtgagcttctcatcttttcatatacctctaacccccggtactcattgaatcattgatgaggtatctcaattgagatttgcaaggactttgataccatttgaaatggaaaaattttgaacgggctttaacatgtttaagaaatatggatggggccggccacagtggctcacgcctgtaatcccagaactctggaaggctgaggcaggcggatcacctgagatcaggagttcgaggccagcctggccaagatggcaaaaaccccgactctactaaaaatacaaaattagccaggcgtggtggcgtacgcctgtaatcccagctactcaggaggcaggagaatcgcttgagcctgggaggcagaggctgcggtgagccgagatcgtgtcactgcactccagcctgggtgacagagactccattt

SEQ ID NO: 1880 - DNA, 6070 bp, Homo sapiens
gtgctgtggcggcggcggcggcggtagtggcggcggcggcggtgcctgggcggcagcagcagcagtagcggcagccctgaggacgatatggtgtaagatacttcttcaagattggacagctggggaccttcttctgattaaccttaaaccaacttgtagccatagagacacctcacaaggttcccatttttgttgttgttgttgttgattttctgctcacacctttcctgaccttgcaaccatgtatggaagtgcccgctctgttgggaaggtggagccgagcagccagagccctgggcgttcacccaggcttccacgttcccctcgcttgggtcaccgtcgaaccaacagtacgggagggagttcgggaagcagtgttggaggtggcagtgggaaaaccctttcaatggaaaatatacaatctttaaatgctgcctatgccacctctggccctatgtatctaagtgaccatgaaaatgtgggttcagaaacacctaaaagcaccatgacacttggccgttctgggggacgtctgccttacggtgttcggatgactgctatgggtagtagccccaatatagctagcagtggggttgctagtgacaccatagcatttggagagcatcacctccctcctgtgagtatggcatccactgtacctcactcccttcgtcaggcgagagataacacaatcatggatctgcagacacagctgaaggaagtattaagagaaaatgatctcttgcggaaggatgtggaagtaaaggagagcaaattgagttcttcaatgaatagcatcaagaccttctggagcccagagctgaagaaggaacgagccctgagaaaagatgaagcttccaaaatcaccatttggaaggaacagtacagagttgtacaggaggaaaaccaggtggatgctctccgattgcgtttggaagagaaggaaaccatgttgaataaaaagacaaaacaaattcaggatatggctgaagagaaggggacacaagctggagagatacatgacctcaaggacatgttggatgtgaaggagcggaaggttaatgttcttcagaagaagattgaaaatcttcaagagcagcttagagacaaggaaaagcagatgagcagcttgaaagaacgggtcaaatccttgcaggctgacaccaccaacactgacactgccttgacaactttggaggaggcccttgcagagaaagagcggacaattgaacgcttaaaggagcagagggacagagatgagcgagagaagcaagaggaaattgataactacaaaaaagatcttaaagacttgaaggaaaaagtcagcctgttgcaaggcgacctttcagagaaagaggcttcacttttggatctgaaagagcatgcttcttctctggcatcctcaggactgaaaaaggactcacggcttaagacactagagattgctttggagcagaagaaggaggagtgtctgaaaatggaatcacaattgaaaaaggcacatgaggcagcattggaagccagagccagtccagagatgagtgaccgaatacagcacttggagagagagatcaccaggtacaaagatgaatctagcaaggcccaggcagaagttgatcgactcttagaaatcttgaaggaggtggaaaatgagaagaatgacaaagataagaagatagctgagttggaaagtctcacctcaaggcaagtgaaagaccagaataagaaggtagcaaatctgaagcacaaggaacaggtggaaaaaaagaagagtgcacaaatgttagaggaggcgcgacgacgggaggacaatctcaacgacagctctcagcagctacaggacagtctccgtaagaaggatgacaggattgaagagctggaagaagcactaagagaaagtgtacagataactgcagagcgggaaatggtgctagcacaagaggaatcagccaggaccaatgctgaaaaacaggtggaggagttactgatggccatggagaaggtaaagcaggaactagaatccatgaaagcaaagctgtcctccacccagcagtctctggcagaaaaggaaactcacttgactaatcttcgggcagagagaaggaaacacttagaggaagttctggagatgaagcaagaagctcttctggctgccattagtgaaaaagacgccaatatagctctcttggagctttcgtcctctaagaagaagacccaagaggaagtggctgccctgaagcgggagaaggatcgtctggtacagcagcttaagcagcagacgcaaaatcgaatgaagctaatggccgacaactacgaggatgaccacttcaaatcctcccattccaatcaaacaaatcacaagccctccccagaccaggatgaggaggagggtatatgggcatagccaatcagaggcttagttcagccattttgttcagaacgatcatccagcccctcttagaacttgaccaaaatagaagtaaattaaagttgtacattggacacctgacaaccctctgccatgaccgagaccccctgatcctccgtggactcactccaccagcttcctataacttggacgatgaccaggcggcttgggagaatgagctgcagaagatgacccgggggcagcttcaggatgagttagagaaaggtgaacgggacaatgcagaactgcaggagtttgccaacgccattcttcagcagatagcagaccattgtcccgacatcctagagcaagtggtcaacgccctggaagagtcctcttgaccctgctttatggggaagcctgaggtagtcaacccaggagccaagaaaagagaactacgaggaacaggtgcccggaaccttcttggcaccaaacactacaaacttcatcccaacttgctcacttgaagaagtgtgattccagcaccgtttctacatctgccatcttactctgcctttctgctttggatgtggtctctacactaaccttcttgatgtccagggtagataaagggtcgaatctctctgaagaactgccacctggtcatcagcagtggagaactgtgggagctggtggctctgccctgacagagagccatggagcagaggagcctctcacctcctgtcctctgacatgagaatgaaaccaggaatggacttggagttcaacaggctgagaggatgcctccaatggaccagagagctgagtgttctaatatcacaataggtgctttctcctaaaagggcaaaaaacaatctcaaaaagattagaaaaagagaaggggggaagggaagagaaaatcgactcttctttttactgtctcttctgcttactttccacatgagatgctttgtaccggggagctgtgagcaggcctcacgatggcttgggagcactcgttctcccaaggtctgagtcttcatccagccctgcctgtctgtcgcagccttcctcactctgttcctcggccagttaacaagaagatggtgtgaggtgttctccaccagtctctcctgtttgagactgttgacgttatcatactgaggtgttagatcaaatatctctaattgaagaacatgtgaggttgaaagagcaccagccagggcaacatagcgtgaccctgtctctacaaaaaattaaaaagagaacatacaaagttgacatatgagaccctgttgtccccgcctgcagctttgccccagtaacagatgcccgttgctcttgggctggtttcccctgaacacctccaagaggctgcctgccttgccagcacccgtgtcctgagctcctgcagcccagtggctgctgaagttgtgatccctcactcaccctgctagctttgcccttgactcgtcttctctgaacctcagcctcgtgcattgcctggaaccttcttctagcataaatgaaggtttttcctcctacacacattccttcctcggttatttcattcagagaatatttatgaaatgcctactgtgtgcaagtcatccatccttgaaaaggccacttctcagtgagggagagatgtagtggattctgtgagacatacctgctggagttgaagcagtaaatagcatgtccttcccctccccgatcttaaggtgtgttttctagaaaagttccctaatggaattcatgagtttgggggtctcagtcacccgcttgcctgtaggattccatttgatgattctggatttttgctgtttgttattgcccttagaggggctctgagtatctacttgtgggtggccatttcctgacatctgcatgtacctcgtggaattcagccagcttcatgttgcaaatcagaaagctgaccccaagactgcaaatcaatgaaggtattggcattgttaaggacgtagcgtagacaacagcagtcataaataattaggcaggaacttaacccaaatctagttctttgaccacctctaccaccagaacccagcagacactcacatctcctgataagagttgctggactcgatgtttttgttttgcattttctcctctccttccccacttactcagagaatttaaagtctgtagagtcagcacagccccatcagtccaggaacttcccaccaccagcccttgactgtcccattaactgacatggtcagatttccagctccccctactccctgctgtgaaacaatccctctccctgtgagaggaaactgtggagcgtttcttatcgaaggttaaatggactctgctcataaacctcttactgagatgcttcctgatagccaggctggccagagaggggtgcaggggttagatagtaagtggtggtcgtttgtggtcagttacctcaattctgttcattgcagtgcccgtaaaccatgtagaaagctcccagcactgaaaggcaggagtgttagcatctcgctttatccaccataacgtaaagaactgcggtgtgataacagccttcacggggccacggtggaaccaagacagcaggcgaggccatgcctaaacaagtggtctggcacgggcactggccagctgctctctccaagcaggtggcccagatcccacccacgtggactttctcatcaggtgcagcgcctgccactctcagccactgggtgtgtgactctcctcttcatctcagcattctccatcacttcccctccagaaaaacggatggaaggaagccctctgtgacactgcttctgagaagaagcatttccgggaccgatatcatctgtctggtctctgtgaacagcaaggaatcttcttgaccgttcttgggcactggaggctggctaggagttcagtaataaacgtggccttcgtgctgtagggcagagtggatgcagtttgtagctttcagagtgtctcattgagtctagatcattgaaccaacacttaaccaaatgtcccactcccatcacactaggacttgtcattccatgcccctctcctagtggtcatggtttcatatgggcatacaactgctactgaagttatatagccttgaaaactcagtgcaggttgcccttaattttccccaaacccctccatcggcaagtctagttgccctttagcacctaaagatctgcaccccaaaccaatgtcaccataaagagggcacgaagaagagtgggtgtgatcccaacggggttttgtaactgaagaagcccagtgtgagcttctcatcttttcatatacctctaacccccggtactcattgaatcattgatgaggtatctcaattgagatttgcaaggactttgataccatttgaaatggaaaaattttgaacgggctttaacatgtttaagaaatatggatggggccggccacagtggctcacgcctgtaatcccagaactctggaaggctgaggcaggcggatcacctgagatcaggagttcgaggccagcctggccaagatggcaaaaaccccgactctactaaaaatacaaaattagccaggcgtggtggcgtacgcctgtaatcccagctactcaggaggcaggagaatcgcttgagcctgggaggcagaggctgcggtgagccgagatcgtgtcactgcactccagcctgggtgacagagactccattt

SEQ ID NO: 1881 - DNA, 3237 bp, Homo sapiens
gcgaagtgaagggtggcccaggtggggccaggctgactgaatgtatctcctagctatggactaaataatacatggggggaaataaacaagtattcatgagggtgaaaatgtgacccagcaggaaaattacaactattttcaattgacgttgaataggatgagtcatggaatttaagtgatttactgaagattatactactggtagatagaagagctaaagaaagatggatactatgatgctgaatgtgcggaatctgtttgagcagcttgtgcgccgggtggagattctcagtgaaggaaatgaagtccaatttatccagttggcgaaggactttgaggatttccgtaaaaagtggcagaggactgaccatgagctggggaaatacaaggatcttttgatgaaagcagagactgagcgaagtgctctggatgttaagctgaagcatgcacgtaatcaggtggatgtagagatcaaacggagacagagagctgaggctgactgcgaaaagctggaacgacagattcagctgattcgagagatgctcatgtgtgacacatctggcagcattcaactaagcgaggagcaaaaatcagctctggcttttctcaacagaggccaaccatccagcagcaatgctgggaacaaaagactatcaaccattgatgaatctggttccattttatcagatatcagctttgacaagactgatgaatcactggattgggactcttctttggtgaagactttcaaactgaagaagagagaaaagaggcgctctactagccgacagtttgttgatggtccccctggacctgtaaagaaaactcgttccattggctctgcagtagaccaggggaatgaatccatagttgcaaaaactacagtgactgttcccaatgatggcgggcccatcgaagctgtgtccactattgagactgtgccatattggaccaggagccgaaggaaaacaggtactttacaaccttggaacagtgactccaccctgaacagcaggcagctggagccaagaactgagacagacagtgtgggcacgccacagagtaatggagggatgcgcctgcatgactttgtttctaagacggttattaaacctgaatcctgtgttccatgtggaaagcggataaaatttggcaaattatctctgaagtgtcgagactgtcgtgtggtctctcatccagaatgtcgggaccgctgtccccttccctgcattcctaccctgataggaacacctgtcaagattggagagggaatgctggcagactttgtgtcccagacttctccaatgatcccctccattgttgtgcattgtgtaaatgagattgagcaaagaggtctgactgagacaggcctgtataggatctctggctgtgaccgcacagtaaaagagctgaaagagaaattcctcagagtgaaaactgtacccctcctcagcaaagtggatgatatccatgctatctgtagccttctaaaagactttcttcgaaacctcaaagaacctcttctgacctttcgccttaacagagcctttatggaagcagcagaaatcacagatgaagacaacagcatagctgccatgtaccaagctgttggtgaactgccccaggccaacagggacacattagctttcctcatgattcacttgcagagagtggctcagagtccacatactaaaatggatgttgccaatctggctaaagtctttggccctacaatagtggcccatgctgtgcccaatccagacccagtgacaatgttacaggacatcaagcgtcaacccaaggtggttgagcgcctgctttccttgcctctggagtattggagtcagttcatgatggtggagcaagagaacattgaccccctacatgtcattgaaaactcaaatgccttttcaacaccacagacaccagatattaaagtgagtttactgggacctgtgaccactcctgaacatcagcttctcaagactccttcatctagttccctgtcacagagagtccgttccaccctcaccaagaacactcctagatttgggagcaaaagcaagtctgccactaacctaggacgacaaggcaacttttttgcttctccaatgctcaagtgaagtcacatctgcctgttacttcccagcattgactgactataagaaaggacacatctgtactctgctctgcagcctcctgtactcattactacttttagcattctccaggcttttactcaagtttaattgtgcatgagggttttattaaaactatatatatctccccttccttctcctcaagtcacataatatcagcactttgtgctggtcattgttgggagcttttagatgagacatctttccaggggtagaagggttagtatggaattggttgtgattctttttggggaagggggttattgttcctttggcttaaagccaaatgctgctcatagaatgatctttctctagtttcatttagaactgatttccgtgagacaatgacagaaaccctacctatctgataagattagcttgtctcagggtgggaagtgggagggcagggcaaagaaaggattagaccagaggatttaggatgcctccttctaagaaccagaagttctcattccccattatgaactgagctataatatggagctttcataaaaatgggatgcattgaggacagaactagtgatgggagtatgcgtagctttgatttggatgattaggtctttaatagtgttgagtggcacaaccttgtaaatgtgaaagtacaactcgtatttatctctgatgtgccgctggctgaactttgggttcatttggggtcaaagccagtttttcttttaaaattgaattcattctgatgcttggcccccatacccccaaccttgtccagtggagcccaacttctaaaggtcaatatatcatcctttggcatcccaactaacaataaagagtaggctataagggaagattgtcaatattttgtggtaagaaaagctacagtcattttttctttgcactttggatgctgaaatttttcccatggaacatagccacatctagatagatgtgagctttttcttctgttaaaattattcttaatgtctgtaaaaacgattttcttctgtagaatgtttgacttcgtattgacccttatctgtaaaacacctatttgggataatatttggaaaaaaagtaaatagctttttcaaaatgaaaaaaaaaa

SEQ ID NO: 1882 - DNA, 5826 bp, Homo sapiens
ccaggagagcggcgtggacgcgtgcgggcctagaggcccacgtgatccgcagggcggccgaggcaggaagctgtgagtgcgcggttgcggggtcgcattgtggctacggctttgcgtccccggcgggcagccccaggctggtccccgcctccgctctccccaccggcggggaaagcagctggtgtgggaggaaaggctccatcccccgccccctctctcccgctgttggctggcaggatcttttggcagtcctgtggcctcgctccccgcccggatcctcctgaccctgagattcgcgggtctcacgtcccgtgcacgccttgcttcggcctcagttaagcctttgtggactccaggtccctggtgagattagaaacgtttgcaaacatgtcccggatcgaaaagatgagcattctgggcgtgcggagttttggaatagaggacaaagataagcaaattatcactttcttcagcccccttacaattttggttggacccaatggggcgggaaagacgaccatcattgaatgtctaaaatatatttgtactggagatttccctcctggaaccaaaggaaatacatttgtacacgatcccaaggttgctcaagaaacagatgtgagagcccagattcgtctgcaatttcgtgatgtcaatggagaacttatagctgtgcaaagatctatggcatggtgaaaaggtcagtctgagctctaagtgtgcagaaattgaccgagaaatgatcagttctcttggggtttccaaggctgtgctaaataatgtcattttctgtcatcaagaagattctaattggcctttaagtgaaggaaaggctttgaagcaaaagtttgatgagattttttcagcaacaagatacattaaagccttagaaacacttcggcaggtacgtcagacacaaggtcagaaagtaaaagaatatcaaatggaactaaaatatctgaagcaatataaggaaaaagcttgtgagattcgtgatcagattacaagtaaggaagcccagttaacatcttcaaaggaaattgtcaaatcctatgagaatgaacttgatccattgaagaatcgtctaaaagaaattgaacataatctctctaaaataatgaaacttgacaatgaaattaaagccttggatagccgaaagaagcaaatggagaaagataatagtgaactggaagagaaaatggaaaaggtttttcaagggactgatgagcaactaaatgacttatatcacaatcaccagagaacagtaagggagaaagaaaggaaattggtagactgtcatcgtgaactggaaaaactaaataaagaatctaggcttctcaatcaggaaaaatcagaactgcttgttgaacagggtcgtctacagctgcaagcagatcgccatcaagaacatatccgagctagagattcattaattcagtctttggcaacacagctagaattggatggctttgagcgtggaccattcagtgaaagacagattaaaaattttcacaaacttgtgagagagagacaagaaggggaagcaaaaactgccaaccaactgatgaatgactttgcagaaaaagagactctgaaacaaaaacagatagatgagataagagataagaaaactggactgggaagaataattgagttaaaatcagaaatcctaagtaagaagcagaatgagctgaaaaatgtgaagtatgaattacagcagttggaaggatcttcagacaggattcttgaactggaccaggagctcataaaagctgaacgtgagttaagcaaggctgagaaaaacagcaatgtagaaaccttaaaaatggaagtaataagtctccaaaatgaaaaagcagacttagacaggaccctgcgtaaacttgaccaggagatggagcagttaaaccatcatacaacaacacgtacccaaatggagatgctgaccaaagacaaagctgacaaagatgaacaaatcagaaaaataaaatctaggcacagtgatgaattaacctcactgttgggatattttcccaacaaaaaacagcttgaagactggctacatagtaaatcaaaagaaattaatcagaccagggacagacttgccaaattgaacaaggaactagcttcatctgagcagaataaaaatcatataaataatgaactaaaaagaaaggaagagcagttgtccagttacgaagacaagctgtttgatgtttgtggtagccaggattttgaaagtgatttagacaggcttaaagaggaaattgaaaaatcatcaaaacagcgagccatgctggctggagccacagcagtttactcccagttcattactcagctaacagacgaaaaccagtcatgttgccccgtttgtcagagagtttttcagacagaggctgagttacaagaagtcatcagtgatttgcagtctaaactgcgacttgctccagataaactcaagtcaacagaatcagagctaaaaaaaaaggaaaagcggcgtgatgaaatgctgggacttgtgcccatgaggcaaagcataattgatttgaaggagaaggaaataccagaattaagaaacaaactgcagaatgtcaatagagacatacagcgcctaaagaacgacatagaagaacaagaaacactcttgggtacaataatgcctgaagaagaaagtgccaaagtatgcctgacagatgttacaattatggagaggttccagatggaacttaaagatgttgaaagaaaaattgcacaacaagcagctaagctacaaggaatagacttagatcgaactgtccaacaagtcaaccaggagaaacaagagaaacagcacaagttagacacagtttctagtaagattgaattgaatcgtaagcttatacaggaccagcaggaacagattcaacatctaaaaagtacaacaaatgagctaaaatctgagaaacttcagatatccactaatttgcaacgtcgtcagcaactggaggagcagactgtggaattatccactgaagttcagtctttgtacagagagataaaggatgctaaagagcaggtaagccctttggaaacaacattggaaaagttccagcaagaaaaagaagaattaatcaacaaaaaaaatacaagcaacaaaatagcacaggataaactgaatgatattaaagagaaggttaaaaatattcatggctatatgaaagacattgagaattatattcaagatgggaaagacgactataagaagcaaaaagaaactgaacttaataaagtaatagctcaactaagtgaatgcgagaaacacaaagaaaagataaatgaagatatgagactcatgagacaagatattgatacacagaagatacaagaaaggtggctacaagataaccttactttaagaaaaagaaatgaggaactaaaagaagttgaagaagaaagaaaacaacatttgaaggaaatgggtcaaatgcaggttttgcaaatgaaaagtgaacatcagaagttggaagagaacatagacaatataaaaagaaatcataatttggcattagggcgacagaaaggttatgaagaagaaattattcattttaagaaagaacttcgagaaccacaatttcgggatgctgaggaaaagtatagagaaatgatgattgttatgaggacaacagaacttgtgaacaaggatctggatatttattataagactcttgaccaagcaataatgaaatttcacagtatgaaaatggaagaaatcaataaaattatacgtgacctgtggcgaagtacctatcgtggacaagatattgaatacatagaaatacggtctgatgccgatgaaaatgtatcagcttctgataaaaggcggaattataactaccgagtggtgatgctgaagggagacacagccttggatatgcgaggacgatgcagtgctggacaaaaggtattagcctcactcatcattcgcctggccctggctgaaacgttctgcctcaactgtggcatcattgccttggatgagccaacaacaaatcttgaccgagaaaacattgaatctcttgcacatgctctggttgagataataaaaagtcgctcacagcagcgtaacttccagcttctggtaatcactcatgatgaagattttgtggagcttttaggacgttctgaatatgtggagaaattctacaggattaaaaagaacatcgatcagtgctcagagattgtgaaatgcagtgttagctccctgggattcaatgttcattaaaaatatccaagatttaaatgccatagaaatgtaggtcctcagaaagtgtataataagaaacttatttctcatatcaacttagtcaataagaaaatatattctttcaaaggaacattgtgtctaggattttggatgttgagaggttctaaaatcatgaaacttgtttcactgaaaattggacagattgcctgtttctgatttgctgctcttcatcccattccaggcagcctctgtcaggccttcagggttcagcagtacagccgagactcgactctgtgcctccctccccagtgcaaatgcatgcttcttctcaaagcactgttgagaaggagataattactgccttgaaaatttatggttttggtatttttttaaatcatagttaaatgttacctctgaatttacttccttgcatgtggtttgaaaaactgagtattaatatctgaggatgaccagaaatggtgagatgtatgtttggctctgcttttaactttataaatccagtgacctctctctctgggacttggtttccccaactaaaatttgaagtagttgaatggggtctcaaagtttgacaggaaccttaagtaatcatctaagtcagtacccaccaccttcttctcctacatatcccttccagatggtcatccagactcagagctctctctacagagaggaaattctccactgtgcacacccacctttggaaagctctgaccacttgaggcctgatctgcccatcgtgaagaagcctgtaacactcctctgcgtctatcctgtgtagcatactggcttcaccatcaatcctgattcctctctaagtgggcattgccatgtggaaggcaagccaggctcactcacagagtcaaggcctgctccctgtagggtccaaccagacctggaagaacaggcctctccatttgctcttcagatgccacttctaagaaaagcctaatcacagtttttcctggaattgccagctgacatcttgaatccttccattccacacagaatgcaaccaagtcacacgcttttgaattatgctttgtagagttttgtcattcagagtcagccaggaccataccgggtcttgattcagtcacatggcatggttttgtgccatctgtagctataatgagcatgtttgcctagacagcttttctcaactgggtccagaagagaattaagccctaaggtcctaaggcatctatctgtgctaggttaaatggttggcccccaaagatagacaggtcctgatttctagaacccgtgactgttactttatacagcaaaggaaactttgcagatgtgattaaagctaaggaccttaagacagagtatcctgggggtggtggtggggtgggggggggtcctaaatgtaatcacgagtaagattaagagcaaatcaattctagtcatatattaaacatccacaataaccaagatatttttatcccaagaatgcaagatttcagaaaatgaaaaatctgttgataaatccatcactataataaaaccgaaggtgaaaaaaattctgaaaaaaaaaaaaaaaaaaaaaaaaaaaa

SEQ ID NO: 1883 - DNA, 815 bp, Homo sapiens
ggcgcaatgctggggcgagggttagccgcgcaggtgcggtgaagggaggatggcggagttggtaccttttgcggttcccatcgagagtgacaaaaccttgctagtgtgggagctgagctccggacccacggccgaggctttgcatcattctctgttcacagcattttctcagtttggccttctgtattcagtccgggtcttcccaaatgctgcagtggcccatcctggtttctatgccgtcattaagttttattctgcaagggctgcccacagagcccaaaaggcatgcgaccggaagcagctttttcagaaatctccagtcaaggttcgtcttggcaccagacataaggcagttcaacatcaagcccttgccctgaacagttccaaatgccaagaactggcgaattactactttggtttcaatgggtgttccaaaaggatcatcaagcttcaggagctttctgaccttgaagaaagggaaaatgaagatagcatggtgccacttccgaagcaaagcctgaagttcttctgtgctttagaagtggtgttgccatcctgtgattgcaggagtcctggcattggcttggtggaggagcctatggataaggtggaggaaggaccattatcattccttatgaaaaggaagacagcccagaagcttgctattcagaaggctttgtcagatgcattccagaaactgttgattgttgttctaggtaagactgtcttgatcatccttgaagtacttcagtttcagtaagcaaataaactcattttgaaaagttaattgaataaaaatattgatatctaaagca

SEQ ID NO: 1884 - DNA, 3107 bp, Homo sapiens
cggtgagtcttggcggctgttaacgcgcgctttgggaacaggaaggttgagagagaggtgctggggtctgcgtctatctctgtcgctcttttcagcccctcctggtattcccctcctaacctgggttttttacacgcccgcgtggcttcctgctcgacctccctgagtctgatcctggtttccacctccagccctgggaaatttcctttctccagactcgccctccccacccgggcctcggactttcaccccagcttctctctcctggccagtgattacccacccccaatcccaccccgccccgccgcgcaactacctcctcccttcacccggactgggaccatcatccccactccactccgcccagtctgggactccacctgcctcctccccaatcccacactaatctctgcttggtctcttcctctttggcctaatctctcgtctcggcttattggggacggccactctcacagtttggttccaaacaccagttcctggatggattcccgccatccatgccccctctttaattagccggtcctctcagtaatgtagcagccccctctacagattagaccctggtcctacactcttagccgctgcctgcttttgacctttggctcatgggtacttgacgttttaaactcctaggcccaggatgaggaggagcttggctcccagccagctggccaagagaaaacctgaaggcaggtcctgtgatgatgaagactggcaacctggcctagtgactcctaggaaacggaaatccagcagtgagacccagatccaggagtgtttcctgtctccttttcggaaacctttgagtcagctaaccaatcaaccaccttgtctggacagcagtcagcatgaagcatttattcgaagcattttgtcaaagcctttcaaagtccccattccaaattatcaaggtcctctgggctctcgagcattgggcctgaaaagggctggggtccgccgggccctccatgaccccctggaaaaagatgccttggttctgtatgagcctcccccgctgagcgctcatgaccagctgaagcttgacaaggagaaactccctgtccatgtggttgttgaccctattctcagtaaggttttgcggcctcatcagagagagggagtgaaattcctgtgggagtgtgtcaccagtcggcgcatccctggcagccatggctgcatcatggctgatgagatgggcctaggaaagacgctgcagtgcatcacattgatgtggacacttttacgccagagtccagagtgcaagccagaaattgacaaggcagtggtggtgtcgccttccagcctggtgaagaactggtacaatgaggttgggaaatggctcggagggaggatccaacctctggccatcgatggaggatctaaggatgaaatagaccaaaagctggaaggattcatgaaccagcgtggagccagggtgtcttctcccatcctcatcatttcctatgagaccttccgccttcatgttggagtcctccagaaaggaagtgttggtctggtcatatgtgacgagggacacaggctcaagaactctgagaatcagacttaccaagccctggacagcttgaacaccagccggcgggtgctcatctccggaactcccatccagaatgatctgcttgagtatttcagcttggtacattttgttaattccggcatcctagggactgcccatgaattcaagaagcattttgaattgccaattttgaagggtcgagacgctgctgctagtgaggcagacaggcagctaggagaggagcggctgcgggagctcaccagcattgtgaatagatgcctgatacggaggacttctgatatcctttctaaatatctgcctgtgaagattgagcaggtcgtttgttgtaggctgacaccccttcagactgagttatacaagaggtttctgagacaagccaaaccggcagaagaattgcttgagggcaagatgagtgtgtcttccctttcttccatcacctcgctaaagaagctttgtaatcatccagctctaatctatgataagtgtgtggaagaggaggatggctttgtgggtgccttggacctcttccctcctggttacagctctaaggccctggagccccagctgtcaggtaagatgctggtcctggattatattctggcggtgacccgaagccgtagcagtgacaaagtagtgctggtgtcgaattacacccagactttggatctctttgagaagctgtgccgtgcccgaaggtacttatacgtccgcctggatggcacgatgtccattaagaagcgagccaaggttgtagaacgcttcaatagtccatcgagccctgactttgtcttcatgctgagcagcaaagctgggggctgtggcctcaatctcattggggctaaccggctggtcatgtttgaccctgactggaacccagccaatgatgaacaagccatggcccgggtctggcgagatggtcaaaagaagacttgctatatctaccgcctgctgtctgcagggaccattgaggagaagatcttccagcgtcagagccacaagaaggcactgagcagctgtgtggtggatgaggagcaggatgtagagcgccacttctctctgggcgagttgaaggagctgtttatcctggatgaagctagcctcagtgacacacatgacaggttgcactgccgacgttgtgtcaacagccgtcagatccggccaccccctgatggttctgactgcacttcagacctggcagggtggaaccactgcactgataagtgggggctccgggatgaggtactccaggctgcctgggatgctgcctccactgctatcaccttcgtcttccaccagcattctcatgaggaacagcggggcctccgctgataaccagctggtctgggtgtagctcttagaggaaggagatagggaaaaggggctccttgctccacagggccctgttgaattttgttctctgggagaaaatcatcaagaagggctgcatgatgtttgcccaaaatttattttataagaaaaacttttttggttaaaaaaaagaataaaggtatgaaagggttaaaaaaaaaaa

SEQ ID NO: 1885 - DNA, 2667 bp, Homo sapiens
gagggtgggtcgaccccgggaattcggcacgagcggcggcggggccacccgcgagtccagcgtcgccgcagccccccaatgcggccgcgagaagcagcgggggggcaggcgatcgaaggagccttcacgtaaatgggtccagtcatgcctcccagtaagaagccagaaagctcaggaattagtgtctccagtggactgagtcagtgttacgggggcagcggtttctccaaggcccttcaggaagacgatgacctcgacttttctctgcctgacatccgattagaagagggggccatggaagatgaagagctgaccaacctgaactggctgcacgagagcaagaacttgctgaagagctttggggagtcggtcctcaggagtgtcagccccgtccaggacctggacgatgacacccccccatcccctgcccactctgacatgccctacgatgccaggcagaaccccaactgcaaacccccctactccttcagctgcctcatatttatggccatcgaggactctccaaccaagcgcctgccagtgaaggatatctacaactggatcttggaacattttccgtattttgcaaatgcacctactgggtggaaaaactcagtgagacacaatttatcattgaataagtgttttaagaaagtggacaaagagaggagtcagagtattgggaaagggtcgttgtggtgcatagacccagagtatagacaaaatctaattcaggctttgaaaaagacaccttatcacccacacccacacgtgttcaatacacctcccacctgtcctcaggcatatcaaagcacatcaggtccacccatctggccgggcagtaccttcttcaagagaaatggagcccttctccaagatcctgacattgatgctgccagtgccatgatgcttttgaatactccccctgagatacaagcaggttttcctccaggagtgatccaaaatggagcgcgggtcctgagccgagggctgtttcctggcgtgcggccgctgccaatcactcccattggggtgacagcggccatgaggaatggcatcaccagctgccggatgcggactgagagtgagccatcttgtggctccccagtggtcagcggagaccccaaggaggatcacaactacagcagtgccaagtcctccaacgcccggagcacctcgcccaccagcgactccatctcctcctcctcctcctcagccgacgaccactatgagtttgccaccaaggggagccaggagggcagcgagggcagcgaggggagcttccggagccacgagagccccagcgacacggaagaggacgacaggaagcacagccagaaggagcccaaggattctctgggggacagcgggtacgcatcccagcacaagaagcgccagcacttcgccaaggccaggaaggtccccagcgacacactgcccctcaaaaagagacgcaccgaaaagccccccgagagcgatgatgaggagatgaaagaagcggcagggtccctcctgcacttagcagggatccggtcctgtttgaataacatcaccaatcggacggcaaaggggcagaaagagcaaaaggaaaccacaaaaaattaaaaacaagtcactgatttgttttgaacttacgaccatttggtttcagcatgtcaggagatttctaatgatttgtggcaatatcagcaattttttttcttttttcttgtttggggtttggttttctttcttttcttttccttttattgggttttaatttgccccctcttctttgttttggacccttaagaattttatttttaaaggagattgaagccatagaactcatattgacactcagctgttttacaaaagcttttcattatctgaagacaaaaccgaaaaagccaaaattaccattgcttcctccagcttgtcagaaacctgtggctgaatccgcagggatgtcaacgtcaatatcacaggaacacacattcggcacctagaaggcacgtgggcaaagtaatcatcgttcaggcccaacccttaggtttaaaaagtcaggttgtccatcccattggggttcactgagtgaaggcacataaagcaattgaggaggaggaggaacccctcgtccccctaggagcagacccaagcttgtggcaccaggcatctgatggtgccaggaaagccactggaattgtcacacggcgagcacagagggccggccaccagtcctcgatgcttctgaaccctgaaccccgatgacatcttacgaggtggacgttggactgttcatgcgcatcgggtgtcagtgactcatggagaagaaatggggtaaatttttagtgatgttgctaatcattgaattctgttctctattaaattaagaaaatgttccaaaagccataagcctgaagattggccctgtgcacgcacgcacacacacacacacacacacacacacacacacacacacacgaaggagagagagagaaaactgatggggaaaacaagctgtgtcttcttaactgcccaagtgaaaagcaaccaagtccaggaaattacaatagctgttaaggaaaggaaataatggtacagatctttttctgtctatcaaaactatttgatccaagtgaaaaaaaaaaaaaaactagaaagctacggaacctgcaatgcggccgc

SEQ ID NO: 1886 - DNA, 802 bp, Homo sapiens
gatttcatcttccaggatccaccttgattaaatctcttgtccccagccctcctggtccccaatggcagcagccgccatcccagctttgcttctgtgcctcccgcttctgttcctgctgttcggctggtcccgggctaggcgagacgaccctcactctctttgctatgacatcaccgtcatccctaagttcagacctggaccacggtggtgtgcggttcaaggccaggtggatgaaaagacttttcttcactatgactgtggcaacaagacagtcacacccgtcagtcccctggggaagaaactaaatgtcacaatggcctggaaagcacagaacccagtactgagagaggtggtggacatacttacagagcaactgcttgacattcagctggagaattacacacccaaggaacccctcaccctgcaggcaaggatgtcttgtgagcagaaagctgaaggacacagcagtggatcttggcagttcagtatcgatggacagaccttcctactctttgactcagagaagagaatgtggacaacggttcatcctggagccagaaagatgaaagaaaagtgggagaatgacaaggatgtggccatgtccttccattacatctcaatgggagactgcataggatggcttgaggacttcttgatgggcatggacagcaccctggagccaagtgcaggagcaccactcgccatgtcctcaggcacaacccaactcagggccacagccaccaccctcatcctttgctgcctcctcatcatcctcccctgcttcatcctccctggcatctga

SEQ ID NO: 1887 - DNA, 3245 bp, Homo sapiens
cgcaggtcgggaggacgagcaccgagtcgagggctcgctcgtctgggccgcccgagagtcttaatcgcgggcgcttgggccgccatcttagatggcgggagtaagaggaaaacgattgtgaggcgggaacggctttctgctgccttttttgggccccgaaaagggtcagctggccgggctttggggcgcgtgccctgaggcgcggagcgcgtttgctacgatgcgggggctgctcggggctccgtcccctgggctggggacgcgccgaatgtgaccgcctcccgctccctcacccgccgcggggaggaggagcgggcgagaagctgccgccgaacgacaggacgttggggcggcctggctccctcaggtttaagaattgtttaagctgcatcaatggagcacatacagggagcttggaagacgatcagcaatggttttggattcaaagatgccgtgtttgatggctccagctgcatctctcctacaatagttcagcagtttggctatcagcgccgggcatcagatgatggcaaactcacagatccttctaagacaagcaacactatccgtgttttcttgccgaacaagcaaagaacagtggtcaatgtgcgaaatggaatgagcttgcatgactgccttatgaaagcactcaaggtgaggggcctgcaaccagagtgctgtgcagtgttcagacttctccacgaacacaaaggtaaaaaagcacgcttagattggaatactgatgctgcgtctttgattggagaagaacttcaagtagatttcctggatcatgttcccctcacaacacacaactttgctcggaagacgttcctgaagcttgccttctgtgacatctgtcagaaattcctgctcaatggatttcgatgtcagacttgtggctacaaatttcatgagcactgtagcaccaaagtacctactatgtgtgtggactggagtaacatcagacaactcttattgtttccaaattccactattggtgatagtggagtcccagcactaccttctttgactatgcgtcgtatgcgagagtctgtttccaggatgcctgttagttctcagcacagatattctacacctcacgccttcacctttaacacctccagtccctcatctgaaggttccctctcccagaggcagaggtcgacatccacacctaatgtccacatggtcagcaccaccctgcctgtggacagcaggatgattgaggatgcaattcgaagtcacagcgaatcagcctcaccttcagccctgtccagtagccccaacaatctgagcccaacaggctggtcacagccgaaaacccccgtgccagcacaaagagagcgggcaccagtatctgggacccaggagaaaaacaaaattaggcctcgtggacagagagattcaagctattattgggaaatagaagccagtgaagtgatgctgtccactcggattgggtcaggctcttttggaactgtttataagggtaaatggcacggagatgttgcagtaaagatcctaaaggttgtcgacccaaccccagagcaattccaggccttcaggaatgaggtggctgttctgcgcaaaacacggcatgtgaacattctgcttttcatggggtacatgacaaaggacaacctggcaattgtgacccagtggtgcgagggcagcagcctctacaaacacctgcatgtccaggagaccaagtttcagatgttccagctaattgacattgcccggcagacggctcagggaatggactatttgcatgcaaagaacatcatccatagagacatgaaatccaacaatatatttctccatgaaggcttaacagtgaaaattggagattttggtttggcaacagtaaagtcacgctggagtggttctcagcaggttgaacaacctactggctctgtcctctggatggccccagaggtgatccgaatgcaggataacaacccattcagtttccagtcggatgtctactcctatggcatcgtattgtatgaactgatgacgggggagcttccttattctcacatcaacaaccgagatcagatcatcttcatggtgggccgaggatatgcctccccagatcttagtaagctatataagaactgccccaaagcaatgaagaggctggtagctgactgtgtgaagaaagtaaaggaagagaggcctctttttccccagatcctgtcttccattgagctgctccaacactctctaccgaagatcaaccggagcgcttccgagccatccttgcatcgggcagcccacactgaggatatcaatgcttgcacgctgaccacgtccccgaggctgcctgtcttctagttgactttgcacctgtcttcaggctgccaggggaggaggagaagccagcaggcaccacttttctgctccctttctccagaggcagaacacatgttttcagagaagctgctgctaaggaccttctagactgctcacagggccttaacttcatgttgccttcttttctatccctttgggccctgggagaaggaagccatttgcagtgctggtgtgtcctgctccctccccacattccccatgctcaaggcccagccttctgtagatgcgcaagtggatgttgatggtagtacaaaaagcaggggcccagccccagctgttggctacatgagtatttagaggaagtaaggtagcaggcagtccagccctgatgtggagacacatgggattttggaaatcagcttctggaggaatgcatgtcacaggcgggactttcttcagagagtggtgcagcgccagacattttgcacataaggcaccaaacagcccaggactgccgagactctggccgcccgaaggagcctgctttggtactatggaacttttcttaggggacacgtcctcctttcacagcttctaaggtgtccagtgcattgggatggttttccaggcaaggcactcggccaatccgcatctcagccctctcagggagcagtcttccatcatgctgaattttgtcttccaggagctgcccctatggggcggggccgcagggccagccttgtttctctaacaaacaaacaaacaaacagccttgtttctctagtcacatcatgtgtatacaaggaagccaggaatacaggttttcttgatgatttgggttttaattttgtttttattgcacctgacaaaatacagttatctgatggtccctcaattatgttattttaataaaataaattaaattt

SEQ ID NO: 1888 - DNA, 4563 bp, Homo sapiens
agaacagaaggctggggtgagggtgggagtcgggtgctaaatatttctactaggctcctgcaaggctagtgatgcagcgggccccccgaccggcgctcgcccgggttctgcgcctaagagttggccgtgagcgacccgcgccgccgggagcctgggtctaggctctcccgacaaggattccaaggcgagaacactggtgcctctgcctgggccagggagggactgaaatcagagcaggggaggcgtttcccccatgggctgtcacccttaaggggccgggagccgaggtgggcgagctcgagagcagagttggagaggtggctgctgtgagttgcatcgggcgttgaggtatctgatgtctgcaccgtttatctaccagacgacgaggcgatttatgcaacagtatcctgtttcagcactgccaaggctatgcgagaacgcggccaggacagcctggcaggactcgtgctgtatgtaggactcttcgggcaccccgggatgctgcacagggccaagtacagccgctttcggaacgagtcgatcacgtccttggacgaaggtagctccggaggctcggtcggggacaagggctcgccgcagcctccccaccccgccctggcacctcacctgccgactgaagatgccaccttgccgtcgcaggagagccccaccccactgtgcaccttgatcccccgcatggcaagcatgaagctggccaacccggccactttgctgagtctgaaaaacttttgcctgggtaccaaagaggtgcctcggctgaagctccaggaaagccgggacccaggttccagcggcccctcttccccagaaaccagtttaagtaggtccgggactgcacctccaccgcagcaggacctggtgggacacagggcaaccgccctaacccctgattcgtgcccgcttcctggccctggggagccaacacttaggagcaggcaggacaggcactttctacagcacctgttggggatgggcatgaactactgtgtgaggtacatgggctgtgttgaagtgctgcaatcaatgagatcactggattttggaatgagaacccaagttacaagggaagcaataagtcgcctgtgtgaagctgtccccggggcaaatggagccattaaaaagcgaaagcctccagttaagttcctatcaacagtccttggcaaaagtaatcttcagttttcaggaatgaatataaaactgaccatctcaacatgcagtctcacattgatgaatcttgacaaccaacagattattgcaaatcatcatatgcagtctatttcatttgcctctggaggggatcctgatactacagactatgttgcctacgtagctaaagatccagttaatcaacgagcctgtcacatattggaatgccacaatggaatggcccaagacgtcataagtaccatagggcaggcttttgaactccggtttaaacagtacttgaaaaatccttctttgaatacttcttgtgaaagtgaggaggtgcatattgatagccatgccgaggagagagaagatcatgaatattacaatgaaattccagggaagcagccaccagtaggtggtgtttcagatatgcggatcaaagttcaagccacggaacaaatggcttactgccccatacagtgtgaaaagttgtgctatttgcctggaaactccaagtgcagcagtgtatatgagaactgtttagaacaaagcagggcaataggtaatgtccatccaagaggggtgcagtcccagcgagatacctcattattgaagcacacgtgccgagtggatctctttgatgacccctgctacattaatacacaggctcttcaaagtacacctggctctgctggaaatcaaaggtcagcccaaccactggggagcccatggcactgcggaaaggcaccagaaactgttcagccgggtgccacagcccagcctgccagctcacattctttgccacacattaagcagcagctgtggagcgaagaatgctatcatggcaagctgagcaggaaggcggcagagagcctcttggtaaaggatggggactttttggttcgagagagtgcaacatcccctggccaatatgtgctgagtggactacagggaggccaagcaaaacatcttctcctggtggatcctgaaggcaaggtgaggaccaaggatcatgtatttgataatgtcggccaccttatcagataccatatggataacagtttgccaatcatctcctctggaagcgaagtaagccttaaacaaccagtgagaaaagataataatccagcacttttgcattccaacaaatgacagtattgaagcaccatcacactgatatttcaagaaaccccattttgtattaggacacaaagataatttaaactttgtttgtagataaaatagagcacaaactgtgaagtgcatctttccaagaccatcatggaccaggtcctctataaaatgaagaactaacaaaaattagtcttcagaaatgaaaatcagaaaagaggaagagggttggtcattttaaaagaaattatatgtatgcacggatgtcactttttaaggccatattgcattgataacaagctaaaagcacaactaaaatttcacatgctaacgacaacttgaatgaactgctggggcagtggtatgtgcctttcaacttgataatttgggggacattttcatattgggagattaattctaagtatcttcatgttctatgactatagaaccatttgccaaaaaaaaaagcttttcttgctacaaaaaataagcaattttcttgagccttattgactttattacattttctgtttagcagcatttttcactgcaatgttaaaataaatatgacattgaattcgaactgtgtgtatgtcagtggaatcaaatcaaaagccactaacatggctgtctgtttcattggactgtcccatttgctggttaaaaggattggggcccaaatcctctggcctagcatttctcagtgtttgctattcagactgtctaaatacagcatgtgacaagctgaagaagccaaatctatcagtcatttctgatttcattatattctccccctcttcctgctaaaaagacaaaaaacaaaaaacaaaaaaaacaaaaaaaacctcatgagtgcatggatttaaaagagggcaaacaaaaccagtattcttcatatttactattcaaattggtttcattcttagtaaaagtacagaatctatttgaaattatagtaaaatttcttcttgattggctgacactgaatcatagtttctcacctacatatatccttagcacctcgtatagatatgatcagacaaaatgcagaagaaaaaaaaaacatattgaatgaagcacttggaaagattttccacatgtagaccaactggtaaactaacagagtgattaagcatggtgtacagaaaagcattacgctgagtcttaccagtgtgaccttcagcaagttgctgaatctgtttgggttccagtttccttggcaataaaatgagctaaatgggctaggtgaatttggaggactacttcagtcctaacttatagtatgagtctctaaaaagcaagtttttcatttgttagaggtcgttattgataaccagtctgtatagttaaggtaaaaaattaagcttttcttctatagtctgtgtccatactcacagaatgaatggcacacctgagatcaacattcacatagtttagactccaaaccattcagtctaaaatactgaaactttggaatatagggaatgatgataaaagtggatttggtttgagtagcagaaaactacttatgtccttttcttgcctttccaagaaaaatgttttttgtttttttttttaatcttgagttatctggatattgccttgactccatttcattttggctatgtagatacaacttagtctttgtgattgtgatatatttgctaagttttaaataaaacttcttttggatagaaatcattagaaaccaagcatactgcactctaatattttactgtaaaggcttatgatttttatttctactgccattaattttttagatggatttgtttcctcttacacaactagaattaatgtatttttcaccagttttccatataccttaggtcttgatcgtttgtccttaaaaaggggatcagcatgagtatagacagtagaaatgtatgggtagtctaaccacttttatcagagacagagcagggctgtggtctcactctagctgagcagagtattaacttggtagcaagagttcctgatacaaatagatgcaatgactgtaaatggtgtcagcagtacacatggataatcagtatttgactgtaatagtatagtagttaaatacagcacttaaaaataccacagacacagttaaagcaaaaggaaacaataaaaggaatgtctgcatgctattttaatctcacattctttatctgtcttaaagtggaaatccatttgcctataaatacctgtaaacgactttaaaaaataaatgattattgctttgtgacaattgaaaaaaaa

SEQ ID NO: 1889 - DNA, 4221 bp, Homo sapiens; identical to SEQ ID NO: 551

SEQ ID NO: 1890 - DNA, 1656 bp, Homo sapiens
cgcccctgctctcgcgccggcgtcggctgcgtctccggcgtttgaattgcgcttccgccatctttccagcctcagtcggacgggcgcggaggcgcttctggaaggaacgccgcgatggctgcgcagggagagccccaggtccagttcaaacttgtattggttggtgatggtggtactggaaaaacgaccttcgtgaaacgtcatttgactggtgaatttgagaagaagtatgtagccaccttgggtgttgaggttcatcccctagtgttccacaccaacagaggacctattaagttcaatgtatgggacacagccggccaggagaaattcggtggactgagagatggctattatatccaagcccagtgtgccatcataatgtttgatgtaacatcgagagttacttacaagaatgtgcctaactggcatagagatctggtacgagtgtgtgaaaacatccccattgtgttgtgtggcaacaaagtggatattaaggacaggaaagtgaaggcgaaatccattgtcttccaccgaaagaagaatcttcagtactacgacatttctgccaaaagtaactacaactttgaaaagcccttcctctggcttgctaggaagctcattggagaccctaacttggaatttgttgccatgcctgctctcgccccaccagaagttgtcatggacccagctttggcagcacagtatgagcacgacttagaggttgctcagacaactgctctcccggatgaggatgatgacctgtgagaatgaagctggagcccagcgtcagaagtctagttttataggcagctgtcctgtgatgtcagcggtgcagcgtgtgtgccacctcattattatctagctaagcggaacatgtgctttatctgtgggatgctgaaggagatgagtgggcttcggagtgaatgtggcagtttaaaaaataacttcattgtttggacctgcatatttagctgtttggacgcagttgattccttgagtttcatatataagactgctgcagtcacatcacaatattcagtggtgaaatcttgtttgttactgtcattcccattccttttctttagaatcagaataaagttgtatttcaaatatctaagcaagtgaactcatcccttgtttataaatagcatttggaaaccactaaagtagggaagttttatgccatgttaatatttgaattgccttgcttttatcacttaatttgaaatctattgggttaatttctccctatgtttatttttgtacatttgagccatgtcacacaaactgatgatgacaggtcagcagtattctatttggttagaagggttacatggtgtaaatattagtgcagttaagctaaagcagtgtttgctccaccttcatattggctaggtagggtcacctagggaagcacttgctcaaaatctgtgacctgtcagaataaaaatgtggtttgtacatatcaaatagatattttaagggtaatattttcttttatggcaaaagtaatcatgttttaatgtagaacctcaaacaggatggaacatcagtggatggcaggaggttgggaattcttgctgttaaaaataattacaaattttgcactttttgtttgaatgttagatgcttagtgtgaagttgatacgcaagccg

SEQ ID NO: 1891 - DNA, 3040 bp, Homo sapiens
aaatcctcctcctccgccatcatccgccgcggtgcggagagcaggtggtgctggaagcgcgtgaggccgggagctcgagagagctaacagactagccggctggacatctggaccgctggatccggaggtggcgaccccggcctgacccggaccctaaatccgtccccgccccagagggcggaggcgcgcgctcgattccccccacgcggcggcgccgcctgtttacgtctgcagatctccaggggagcccaccagcctagtcaacatggcctcggaagacattgccaagctggcagagacacttgccaagactcaggtggccgggggacagctgagtttcaaaggcaagagcctcaaactcaacactgcagaagatgctaaagatgtgattaaagagattgaagactttgacagcttggaggctctgcgtctggaaggcaacacagtgggcgtggaagcagccagggtcatcgccaaggccttagagaagaagtcggagttgaagcgctgccactggagtgacatgttcacgggaaggctgcggaccgagatcccaccagccctgatctcactaggggaaggactcatcacagctggggctcagctggtggagctggacttaagcgacaacgcattcgggcccgacggtgtgcaaggcttcgaggccctgctcaagagctcagcctgcttcaccctgcaggaactcaagctcaacaactgtggcatgggcattggcggcggcaagatcctggctgcagctctgaccgaatgtcaccggaaatccagtgcccaaggcaagcctctggccctgaaggtctttgtggctggcagaaaccgtctggagaatgatggcgccactgccttggcagaagcttttagggtcatcgggaccctggaggaggtccacatgccacagaatgggatcaaccaccctggcatcactgccctggcccaggctttcgctgtcaaccccctgctgcgggtcatcaacctgaatgacaacaccttcactgagaagggcgccgtggccatggccgagaccttgaagaccttgcggcaggtggaggtgattaattttggggactgcctggtgcgctccaagggtgcagttgccattgcagatgccatccgcggcggcctgcccaagctaaaggagctgaacttgtcattctgtgaaatcaagagggatgctgccctggctgttgctgaggccatggcagacaaagctgagctggagaagctggacctgaatggcaacaccctgggagaagaaggctgtgaacagcttcaggaggtgctggagggcttcaacatggccaaggtgctggcgtccctcagtgatgacgaggacgaggaggaggaggaggaaggagaagaggaagaagaggaagcagaagaagaggaggaggaagatgaggaagaggaggaagaagaggaggaggaggaggaagaagagcctcagcagcgagggcagggagagaagtcagccacgccctcacggaagattctggaccctaacactggggagccagctcccgtgctgtcctccccacctcctgcagacgtctccaccttcctggcttttccctctccagagaagctgctgcgcctagggcccaagagctccgtgctgatagcccagcagactgacacgtctgaccccgagaaggtggtctctgccttcctaaaggtgtcatctgtgttcaaggacgaagctactgtgaggatggcagtgcaggatgcagtagatgccctgatgcagaaggctttcaactcctcgtccttcaactccaacaccttcctcaccaggctgctcgtgcacatgggtctgctcaagagtgaagacaaggtcaaggccattgccaacctgtacggccccctgatggcgctgaaccacatggtgcagcaggactatttccccaaggcccttgcacccctgctgctggcgttcgtgaccaagcccaacagcgccctggaatcctgctccttcgcccgccacagtctgctgcagacgctgtacaaggtctagactcaaagcctctcccatcccttggcctggaccagtgagctggggagggactcggatgaactgaggcgcagcctacgccattgccttggacaggactctggccacaggcagggcgggtctgtgtcccatgtgtcctgtcagtcccctgagtatgtgtgtgggtgtggcgcatgtgcaggtctgtgcctcctgtcgggatttgggttttaacgtcttctgctggcccagccctgctctgttgtggggagttggcccccaggggaaagggctgtgagctgctccgccattaaactcacctccacctgagggcgctctgctgatctccgcctgggccctgatggccgtccccacccacctgccttccggcccggctccctggcggagccagaacccagggagttgcccgcgtgctgtccttcccctctgtgttgtgattgggttgtttcctgccctgcctggggctgcttctcgtcaccaagccctggtcctgcggcagctgtcacccctaccatccataccactgtgctgaccgctcagcctgaagagcagagaatgccatgggtgggactgtgggggtcggatcgtggggttgttggcagagggcaaccctgggccccacaccgtgtggacaggcagacaccagattgtccaggagcaggagctgctgggactgcgctggccccggacctagtgggccttctcctggctgctgagatgtcgtctgtgactggcctggctggagggggagtgttgacaacccaaagctgttctccagtctggggagggagaggcagggtccccaatgtccgagctgcatctggacgctgctcttaaaggacctcctggggcaggggagcggtagggtctggactgggcagatgctgtatgacctccctgagcacccgtgactgccccatgctttcccctttgtgctctgtgtgtgtctgggctgtgcccgggggcttcacaaataaagtcgtgtggcagcttcaaaaaaaaaaaaaaaaaaaa

SEQ ID NO: 1892 - DNA, 4369 bp, Homo sapiens
ggtcgccctcagtcccacccggtgcctacggggccgcatcgccgcccggctcggcccggcccatgcccagggccgctgctccctcagttgccgccgccgccgccggcgcccagggggccgccgcggctgtgaggtgggggcggcagcgggaggcggcggggcgggccgccggggccggggctgggggcgcagcgcggccggcgtaggtctatgtcgcgggcggcggcggcggcggcggccgcggagggacgatgcgcgagtacaaagtggtggtgctgggctcgggcggggtaggcaaatccgccctgaccgtgcagttcgtgaccggcaccttcatcgagaaatacgaccccaccatcgaggacttctaccgcaaggagatcgaggtggattcgtcgccgtcggtgctggagatcctggacacggcgggcaccgagcagttcgcgtccatgcgggacctgtacatcaagaacggccagggcttcatcctcgtctacagcctcgtcaaccagcagagcttccaggacatcaagcccatgcgggaccagatcatccgcgtgaagcggtatgagaaagtgccagtcatcttggttgggaacaaagtggacctggaaagtgagagagaagtatcgtccagcgaaggcagagcccttgctgaagagtggggctgcccctttatggaaacttccgctaagagtaaaacaatggtggacgaactctttgcagaaattgtgaggcagatgaactatgctgctcagcctgacaaagatgacccatgctgttctgcatgtaacatacaatagcatccaaatatggctgtcctggatgggatttgcccaatgtcgtaggtgatagaaaactcgcctactccactgcagaacttgcagaatgcgtggtgttaatctacagagaactgcagcccttattcagaattgagcagtgattgtcagttgatatctctgagtaacatttgggttcagtaactacagttttcaccatttgtcctcagtctcctttatgcatctgcaactttaaggcatagtccatcgatctacagggtgatctcatttgaaagctatgatggcattgtcgctgagttgacagaagcaactattgtacaaattaaaaataaccataagggagaaaccagaagaattcctctgaccacttacaattaaaatattttgtcttctttaaaaaaataagtaaaggagaaatattttcctacaagagtactgaatttcaggaaatgggatagagcttctaaccagtgtattccgtcaagtaagataataacagctgacctgccaacagcattacagggagattctttgctcagctaacacatttctgtttttcaaaattgatgcttaattgtagctgttattctaatttgtgacatggaactaactcatgcttcaatccttgatagagcaaaactcagaacaggttatgtaaaaatatagtctggctttagaatttgttaattcacctgctttgccacagaaaatggaggctttcacaagggtttgatcagaattaaaaccccaaaccagccctctgttaggggtggtctttataactttactgaacaagagggaagcaactgtgatgggaagagattacctagccttactaacaagaagcattctaatagataaactagtaccatcatgtaaggaagatgaagccatgttgcatccacatgttcccgtttgcagaaacctcacaggacagtacgaatatctggcatttttaagttcattaaagcagcaaattccttctcgcctttaagggctatggttgtagtgtgacccgtggctaacctgctttcaaaatcaagtatttgctgtagcagagctttattgcaggcattttaaaaattgaataaccatgtgaaataatttgggcttaaaagtgaacataaattatagagtggaaggtaagggacaaaagccttttacctttaattttcctggagaattatatataggttttcttagaacaattttaccctgattactgaagcgtcaaataaagctggagtgaaaattttgttttgaaaaggtgctcaagctctgacatttttggttttcatagtcgtgaagtatttatcatttgcatgactaatggcacaggaaaaacctattcataagttttacaatcaagtatagaggggtcttcagctaacttagttatacataaatgctgaaaagattatcttgagctgggccttgggagaagaatttggccttcagaactgcaatatcactgagcctgcgatctatacaccaccccacattttgttggtttcacagtcttgtgcaagtaacctctggtcttacgtgtgtaactgagagaagagtgtgtgtttgtgtgtgcatgtgtgtttattgttcctaagaatttggcacaagtcagagataattgcctatactaagaatctatactgcagaatatagtgtatcaaaaacttttttcttttaaattattaaagtgtcttttatacttttatgaaatcattggtagccccccaagtgtttaataactggcattaagcttagagggtgaaaaaaaaaaaaaaaagattgatagtatttttcataatgaaaaaactgaagagatacgtgaatgaaaccaggccatagctgtcataaatctttgacttttgaatatttacattcttcagtataattttttataatcctcaattatgaaccaccttgtttataggacaaaaaaatttaaccaattttattgaaacgaatttcactgtgtaaaagttggtttgattcaaacatgtagagaagttgtagattcaagatatatgatttctctatggaaataaaaatatttgttagtgaattggttgagttttgattcctctaacttctcagaatgattctttagaattctataattcatagcaatttttgacaagtaagattgcaaaatagaaatatctataaagattccacagtttgacattatggcttgctatgcagatgtgaaaataggttaaataatatgaaagatatggcagaatgtaaagtggaaaagatgacctaaaattttgagttgtattaatagttaaaaacatttgtgtcagatgacagggtgggcttttactgtcaagacatgaataagaactgatctggctgcctgatgagtgtttccacgcagccctgcatatttagtgaccaaggcatcaaggacatcccgaaactggaaattcatatccatctggtatgaatatataactcagctggcaaatgaatgtgtttgttgagatattacagtaataaaacacttaagaacaggaagattacatttgttggcatacgaaaccttagtggctacagaagaaagttgaccttgtgtcactatttattttatgccctgatcagactagcaacttagataagtgaaagtttttctaacatgccttaaaaatattatggtttgatccaaagacccactttttctttagctcttgtgataagattttgttttttttacttttatacaaaggcagcatctttgaatttttttttcttttgatgttgcaacttttgggttcttttaaactgtgatagtgatggtaactgatgcctttcattttgttcaacttacacaaaacaagccagcatctgatcaaaagtattacataaaatattttcttaaactattgaaaggtgctttgatgattttctcctttggtttgtagaattaggactgaacttttgactcaaattgctacagttgccatcacctttctgtggtaatactactgatatttgcttttctatataaagaaatgttgcctaaggctgtctggtatttcttttcaagggttttccagtatgaatgttaatgttgtcagtgtatgtatgaatatgaaagtgctttgttttgtttgttgctgttttttgtttatgtgtgtgtttttaatttttttgttcttatcagcagtcttgtgttagcactgggtaagctttaattgtcccttagccaatcaaacattaaggactatggaggtctttttttttttatttaacatgtcattgttcatctattaaatcttgatcagggtttcaagaatgactgcagtgggttttggaaacagacttatcattattgatttgaggtttcccagagatatagttcacagttaattgttgcgctctaatacaactgaccatttaaaattgaacaagtttattgttttgtaacaatgtcagttgttaaaccttgacatttcaattaaaacatgaattgtagttataactcaatgcaaattcaacagttgtatttggagttaaattattttaacaaataaatttatttaatgaagaaaaaaaaaaaaaaa

SEQ ID NO: 1893 - DNA, 2907 bp, Homo sapiens
gccatctgggcccaggccccatgccccgaggaggggtggtctgaagcccaccagagccccctgccagactgtctgcctcccttctgactgtggccgcttggcatggccagcaacagcagctcctgcccgacacctgggggcgggcacctcaatgggtacccggtgcctccctacgccttcttcttcccccctatgctgggtggactctccccgccaggcgctctgaccactctccagcaccagcttccagttagtggatatagcacaccatccccagccaccattgagacccagagcagcagttctgaagagatagtgcccagccctccctcgccaccccctctaccccgcatctacaagccttgctttgtctgtcaggacaagtcctcaggctaccactatggggtcagcgcctgtgagggctgcaagggcttcttccgccgcagcatccagaagaacatggtgtacacgtgtcaccgggacaagaactgcatcatcaacaaggtgacccggaaccgctgccagtactgccgactgcagaagtgctttgaagtgggcatgtccaaggagtctgtgagaaacgaccgaaacaagaagaagaaggaggtgcccaagcccgagtgctctgagagctacacgctgacgccggaggtgggggagctcattgagaaggtgcgcaaagcgcaccaggaaaccttccctgccctctgccagctgggcaaatacactacgaacaacagctcagaacaacgtgtctctctggacattgacctctgggacaagttcagtgaactctccaccaagtgcatcattaagactgtggagttcgccaagcagctgcccggcttcaccaccctcaccatcgccgaccagatcaccctcctcaaggctgcctgcctggacatcctgatcctgcggatctgcacgcggtacacgcccgagcaggacaccatgaccttctcggacgggctgaccctgaaccggacccagatgcacaacgctggcttcggccccctcaccgacctggtctttgccttcgccaaccagctgctgcccctggagatggatgatgcggagacggggctgctcagcgccatctgcctcatctgcggagaccgccaggacctggagcagccggaccgggtggacatgctgcaggagccgctgctggaggcgctaaaggtctacgtgcggaagcggaggcccagccgcccccacatgttccccaagatgctaatgaagattactgacctgcgaagcatcagcgccaagggggctgagcgggtgatcacgctgaagatggagatcccgggctccatgccgcctctcatccaggaaatgttggagaactcagagggcctggacactctgagcggacagccggggggtggggggcgggacgggggtggcctggcccccccgccaggcagctgtagccccagcctcagccccagctccaacagaagcagcccggccacccactccccgtgaccgcccacgccacatggacacagccctcgccctccgccccggcttttctctgcctttctaccgaccatgtgaccccgcaccagccctgcccccacctgccctcccgggcagtactggggaccttccctgggggacggggagggaggaggcagcgactccttggacagaggcctgggccctcagtggactgcctgctcccacagcctgggctgacgtcagaggccgaggccaggaactgagtgaggcccctggtcctgggtctcaggatgggtcctgggggcctcgtgttcatcaagacacccctctgcccagctcaccacatcttcatcaccagcaaacgccaggacttggctcccccatcctcagaactcacaagccattgctccccagctggggaacctcaacctcccccctgcctcggttggtgacagagggggtgggacaggggcggggggttccccctgtacataccctgccataccaaccccaggtattaattctcgctggttttgtttttattttaatttttttgttttgatttttttaataagaattttcattttaagcacatttatactgaaggaatttgtgctgtgtattggggggagctggatccagagctggagggggtgggtccgggggagggagtggctcggaaggggcccccactctcctttcatgtccctgtgccccccagttctcctcctcagccttttcctcctcagttttctctttaaaactgtgaagtactaactttccaaggcctgccttcccctccctcccactggagaagccgccagcccctttctccctctgcctgaccactgggtgtggacggtgtggggcagccctgaaaggacaggctcctggccttggcacttgcctgcacccaccatgaggcatggagcagggcagagcaagggccccgggacagagttttcccagacctggctcctcggcagagctgcctcccgtcagggcccacatcatctaggctccccagcccccactgtgaaggggctggccaggggcccgagctgcccccacccccggcctcagccaccagcacccccatagggcccccagacaccacacacatgcgcgtgcgcacacacacaaacacacacacactggacagtagatgggccgacacacacttggcccgagttcctccatttccctggcctgccccccacccccaacctgtcccacccccgtgccccctccttaccccgcaggacgggcctacaggggggtctcccctcacccctgcacccccagctgggggagctggctctgccccgacctccttcaccaggggttggggccccttcccctggagcccgtgggtgcacctgttactgttgggctttccactgagatctactggataaagaataaagttctatttattct

SEQ ID NO: 1894 - DNA, 2592 bp, Homo sapiens
atggcggcggcggcgcctgctgctgcggcggcttcttccgaggcgccagcggcgagtgcgactgcagagcccgaggccggggaccaggacagtcgcgaggttcgagtgttgcagagcctgcggggcaagatctgtgaagcaaaaaatttattgccatatcttggaccccacaaaatgagagattgtttctgtaccataaatttggaccaggaagaagtttatcgtacccaagttgtggaaaaatctttaagcccatttttcagtgaagaattttactttgagattccaagaactttccagtatttgtctttctatgtttatgataagaatgttttacaaagagatctccgtataggaaaagtagccatcaaaaaagaagacttgtgtaatcacagtggcaaagaaacttggttttcattacagcctgttgactccaattcagaggttcagggtaaagttcaccttgaattaaaactgaatgaactgataacggagaatggaactgtatgccagcagcttgttgtacacatcaaggcatgccatgggttgcctctcataaatggccaaagctgtgacccttatgcaacagtttctctagtgggcccttctaggaatgaccaaaagaagacaaaagtaaagaagaaaacaagcaatccgcagtttaatgaaatcttttattttgaagtaaccagatccagtagttacaccagaaagtcccagttccaggtagaagaggaggacattgaaaagctagaaatcaggatcgacttgtggaacaatggaaacctagtccaagatgttttcctaggtgagattaaggttcctgtgaacgtattaagaactgattcctctcatcaagcctggtacttgctacagccaagagacaatggaaacaagtcatccaaaactgatgacctggggtctcttcgattaaatatatgttatacagaagactacgtgcttccttcagagtactatggtcctttgaaaactttgctgctaaaatcaccagatgttcaaccaatatctgcctcagctgcttacattttgagtgaaatatgtcgagataaaaatgatgctgttttgccccttgtacgactgctgctgcaccatgataaacttgttccttttgccactgctgtggctgaattagacttgaaggatacacaagatgcaaacacaatttttagaggaaattccctggctacccgatgtctggatgagatgatgaaaatagtgggagggcactacctgaaagtaacattaaaacctattcttgatgagatatgtgactcctcaaaatcctgtgaaatcgatcctattaaattgaaagagggagataatgtagaaaataataaggagaatctgcgctactatgtagacaagttattcaatacaattgtaaaatcaagtatgagctgccccactgtaatgtgtgatatcttttattctctaaggcagatggctactcagagatttcctaatgaccctcatgttcagtattctgcagtgagcagctttgtatttcttcgtttctttgctgtagccgtagtatcacctcatacttttcatttgcgacctcatcatccagatgcacagacaattagaacattaactctcatctcaaaaactatacaaactttgggaagctgggggagtctgtccaaaagcaagtcaagtttcaaagagacattcatgtgtgaatttttcaaaatgtttcaagaagaaggatatattatagcagttaaaaagttcttggatgaaatttcatctactgaaactaaagagtccagtggtacgagtgagcctgtgcacctgaaagaaggtgagatgtataaaagagctcaaggaagaactcggattggaaaaaagaattttaagaaacgatggttctgcttaacaagcagagagctcacctaccacaaacagccaggcaaagatgcaatctacacaatcccagtaaaaaacattcttgctgtggaaaaactggaagagagctctttcaacaagaaaaatatgttccaagtaatacatacggagaaaccactctatgtccaggcaaataactgtgtagaagctaatgaatggatagacgtactctgcagggtgagccgatgcaatcaaaacaggctcagtttttatcatccctctgtgtatctaaacggaaattggctctgctgtcaggagactggtgaaaacactctcggctgcaagccatgtactgcaggtgtccctgcagacatccaaatagatattgatgaagacagagaaacagaaagaatttattccctttttaccctcagtttacttaagctgcagaagatggaagaggcttgtggaactattgcagtctatcaaggaccacagaaagagcctgatgattattctaactttgtaatcgaggattctgtaacaacctttaagacaattcagcaaataaaaagcataattgagaagctggatgaacctcatgaaaaatataggaagaaaagatccagtagtgcaaaatatgggagcaaggaaaatccaattgttgggaaagcatcttagagtttaacagattggttcagaagaactggaaaatattatttt

SEQ ID NO: 1895 - DNA, 2603 bp, Homo sapiens
ggcgcttggggtggccccgcccgccaggctccaccggcccctcctccccgcggggtggcagcccgctggacgcggggccgagggcgcggacgccgacgggtccggggccgcgcgctccagggaagcctgcatcccgctcccctgggccccgacgggcgggcgcactgcgcggggcccaccggccgcagacctgcgtggccgtccagggcgtcgccatgtcctcggtgtttggaaaaccccgcgcgggcagcgggcctcagagcgcgcccctcgaggtcaacctggccatcctggggcgccgcggggctggcaagtctgccctgaccgtgaagtttctgaccaagaggtttatcagtgaatatgaccccaacttggaggacacctacagctccgaggagactgtggaccaccagcctgtccacctgagggtcatggacactgcagacctggacacccccaggaactgcgagcgctacctgaactgggcccatgccttcctggtggtgtacagcgtcgacagccgccagagctttgatagcagcagcagctacctggagctgcttgccttgcacgcgaaggagacacagcgcagcatccctgccctgctgctgggcaacaagctggacatggctcagtacaggcaagtcaccaaggcagagggtgtggctttggcaggcaggtttgggtgcctgtttttcgaggtctctgcctgtctggactttgagcacgtgcagcatgtcttccacgaggcagtgcgagaggcacggcgggagctggagaagagccccctgacccggcccctcttcatctccgaggagagggccctgccccaccaggccccgctcaccgcgcggcatgggctggccagctgcaccttcaacacgctctccaccatcaacctgaaggagatgcccactgtggcccaggccaagctggtcaccgtgaagtcatcccgggcccagagcaagcgcaaggcgcctaccctgactctcctgaagggcttcaagatcttctgaggccccctccccaggaagcctaggctcggtggctggacaggactgcagcaggacagggactggcttctcaccaccagcctttccgtctgatggacagcagaccccgcctccagcaccaagcagtgtccctacactcaattcactgtgtgagctggagtggcaggcagggatgctgcttctgttccctccaggccttggtcttcatggtaaccaccgcgtctgtggccgtagagggaaacagccactgtgacaacccagagacctggggtcagccttaagtaggaagaaattgcagtgtctatcctgctgccatcagcccttcctgctccagctacagttgggccagctgtggccttagtggatggtctgggtggatggctctgtcaatgtcaggcccgagaacagcctgcggaatgacagcctggggtccttgtgccacctggtggacgggaaaggcagggcggctgcagtttcagaggccagagcctggccctcctgtcatctgctgacttcacagaaggcccaggctacaaaccccacagtttatccaaggaaaatctagttaaaataatccaatggacagaagccccaggaaggggtatttccaacacttggcgtctcaatgaggataaaagggagggactgtaggttgtccagcataaggagccccagagttctttcaccagcagacagattctccatgtgttttcccactgttaaggactctgtccaaagaacctcagcatcagctccctcaagcttaatgatccaggctgcagaagaaagttgtcactccagtgagttacccagggctccagggagcccacagcagcatcagacccatccaggggctacagggcctgcccccctgcaggtagaaacacagtatacccgtttgtcatctggtttggcaggacccaggaccctcagcaatgagtctgagtgttcaaagcccactttagaacctaaagcattttgggttaataaagcaaaattttgcttatgttatttggtggtgtcaccgcagcttataccaagacaccatggctcagacatgggatcaggacacacctttgagatcccactgttagcaagaaaaggctgtccaaggcaggcagtgtggtagttgtctgattttgtttaccacacgccaggtcccagggaagtcttgcacagactcttagcagacaagcagggaaaagagagggtcctggtgggtggaaggattgggaaggggattctgggcctggaagcctgctccttcccctctcagccgtctcaggactactgttggattgcaaacagcatctctgacccagtcttcggactcattctgtaaatggaggagctgaggtcagaggggggctgtgaactactcaagaccacatgcttgcagtcctacaggcttcccgacccacaggccagctacggattttgcacttttgctccaggccacttgtgtgtgtatgtgtgtgtgtaccactgccatctgaacaaactatgcaataccacctgctcccttccaggagcattttaataaaagattttttttaataacagaaaaaaaaaaaaaaaaaaaaaaaaaaa

SEQ ID NO: 1896 - DNA, 5223 bp, Homo sapiens
gtggctagtgaggcccagcctgtatatttctaacagggcgccccatgccccagcaccctccccactgggaccactcctcatagaatagccccactccaaagcatttatgacttgaaccttctgaccaaagctctctgaatcttgggggaacctagaagaggaaaaggaatgtcaggctctgtcagagtcagccaagcgagatcagccaggggtctgctccctgcagaccatacggggagccagggtttgcaatgagtctaaactggaatcttaccctgcaaaacgaatggccactattagagttttccaaaaccactctgaagcccctgactgtgcccaaagttcagatctcagaggtggatgccccgccggagggtgaccagatgccaagctccacagactccaggggcctgaagcccctgcaggaggacaccccacagctgatgcgcacacgcagtgatgttggggtgcgtcgccgtggcaatgtgaggacgcctagtgaccagcggcgaatcagacgccaccgcttctccatcaacggccatttctacaaccataagacatccgtgttcacaccagcctatggctctgtcaccaacgtccgcatcaacagcaccatgaccaccccacaggtcctgaagctgctgctcaacaaatttaagattgagaattcagcagaggagtttgccttgtacgtggtccatacgagtggtgggcccatgtgagcagatctccaaagtgttcctaatggagaaggaccaggtggaggaagtcacctacgacgtggcccagtatataaagttcgagatgccggtacttaaaagcttcattcagaagctccaggaggaagaagatcgggaagtaaagaagctgatgcgcaagtacaccgtgctccggctaatgattcgacagaggctggaggagatagccgagaccccagcaacaatctgagccatgagaacgaggggatctgggcaccccaggaaccgccattgcccataagacccccaggaagctaggcactttctttccatggaaacatttagacacaaacctccccagctccggccaagccatcatttgctacctggagctggatgtagaagtcagcagacagctccctatccctggacccctgccctccttttttctgctcacaaggacttttgattttagttataaggaggacccaaaatgtgtgtgtgtacatgtgtgtgcacacatggtacgtgtccatgtgcctacctgatactttcacatgtaattaaattccaggcaaccagcacaagagccgtgagcttggcacatgtgctgctcgtgagcaggaaaatcagaggagccactgatctgagtggtatttaggttgaaggaaagatttctcctctcaagtgccagggagcagccacacgtctgtctgtgtttagagagggaagagggttctccaggttcaccatttgggttgtttatatgttggtagaaattctccctgtatgcctagaaggatcagtgaatgtaagagccttggaaattaacaaaataacagccacataaccttgcggcaagtctgatggaaagaaaaagataaaccatccgtggggtagatgcaataagcccacgtatttttacactggaaacgttgattgttttaaatgacaaagacatatgtgatgttctatgtggaaacctgtgaagagtggattctgcctccatctctgcctccatggctacctttaggagacagagaagatcctgtgtgtttctctgtacccagctgacagcctgtctctatggcgcttccttgagtggaaggaaatgtctcaagaaacaaagatctcgctggtgcgtacacagtgctgaccagctagtgtggccagggcctggtggcctggtggccaggaagtttcaggttgaagggaaatgtcgaggctacctgcagatatgacaggtgccttgaacgcagcccatcttcatgtcatcaaaggtcttcctgcacttgaagctggggcgatgtttgcagtcaagaccattctttccaacctctgggttcttgcaagttgccctcaccttgtgtgtggagatgcattccaagaatgaagcctcatcttgctactgagtgtggggttcagggaagctctttaggccacctggtgaaggtgcatggggaggatggagcttctcctcagctcctctgagcagccacctatgtgatctttaaatccaaccccaatgggagaaaagggcaagaacagtctgtgccctgggactcctatcaggaagcttgacaggcagctgggcatcagtgcagctgatatcgtttgaggagggagacagatgcttggacctgggtgcctggctatggagattgaccaagcaagatcaggagctcctgatagcaggcgtctttgagcctagctggggtagaggcactgcccatctcttctccaccttctctccacagaatgtttgcagagctgggcagttgaggaaaggacagcccctggttggtgcctccaaaggaaggtggacttttttggtggagacgtttctgccctgggcaccctcctgcccccgattcatacctatggcttcttgagaaggctcacagctgtggtcttaacgtagactgcagaaagatggcatgcggcccctggcatttcgccaagggttttatagcaagtctccttcctccatagggacagcagcaccagccctgtggggcatggagtggaagcccagaagggcttctgcaagctgcacagaactggggtaagaagacaaagagtagccaccgggagaggcttcctttgttacagctgggaaagaacagttctgtgaatgcaaacacctcctgagttttgcaattgagaaaatgatttggagaacttctcttctggtaatttttattttgaatgttcagggccttagttggccccagtaattctccttggaggacttgggagaagaatttccacaaagcaaactactaaccactagctcttactggacagcgatttctggcttataagagttctctttgatttgcactagcactacgatagtgttagatggggaaatactgcaacatgtccagttggccagatcactttccaagggagcgatactaaggcagactcagctttttaaagatgggaggtcaggaggtggaagtgagaggagatcccatctcacacaacacacttccacgtaatgcagaccacacttttccattttgtcctgccctcttgagaggtcatttctcacgtcctaagaacctgatcagaaattttggaagggttctttgaaatagcagcagttgaaacagagacactttgccacagtgtggagcagattttctcactggtatcacatggtcttgcagttttgaactcttcgaccgatttgtgggagtttatgtaattgcgtgcaatgaacctgaaattgtgtaaaggacaaaagaccagtttatagggttgggttttttttccaacttgtgaaaagcagtttagctgcatctgtctccccaccacccccaccccgggaggggcttatgttacaaggtgatcaagtgaaggaaaaacctgagcctatctggctgggatggtggaattaagcacaaggtcacattctctgtgatcacatgagagggaaggtgatgacttaaatggcagggggtggggattatcttggggagaggctgaaaagcacaaaagatagtcttccctgtacgtattggtgaagaacgtgcacaaggctggatggacttcaacttggagttgagttgaggcaagaggatttctggatattagtcacccatctgcaagaaaaatgctgaggcctcgggtcaagattttgatctgagacatgctgatgcttcaaggagaaatattttcacaatcctctcttccctcaccagaagagaacagtactctctcctagaaacctctaggtaaacacattttatcctaatatcggtagcatataatgccccccccaaaatatctgttttccatgcaaaaaagtctcaacaagaagtctgtggagttgagtggttacttcaaagtgtcaggagagtgaagaaattggccacagaagagcaagaagctctcttaagaaaagggaattctctttaaagaaaccaccaccaacaacaaaacaaccaaaaaccatgttttatgtcaaagctctgtagcacagagaatgtggtgtcacagatacatcgccgagagaggtttctttctttcttttttttttttttgagacagagtctggttctgtttcccaggctggagtgcagtggtgggatctcagctcactgcaacatccgcctctggggttcaagtgattctcctgtctcagcctcccaagtagctggaattacagggacccgccaccacgcccggctaatttttttgtgtggttttagtagaggtggggtttcaccatcttggccaggctggtcttgaactcctgacctcgtgatccacccgcctaggcctcccaaagtgttgggattacaggcgtgagccactgtgcccagccaaaagagaaatttctacatgaacaaggcaatttcagtgtcttacagcggccaaaccatgacgtgaagaatgagataggagacaggagatcaccataagcgtccctgatatagcagcacacattttcacgtttccacttaaatcgttttgcacaaagtcttgcttcgctcagatgagatgagatatgatttcctagagatgtaaaaataagaatgaatgtggcgcccccttcttccagatgtaatagaaagctctgccctatcacaaggggggtgttgaagcgccccttgtgttttaactgtatttaactgagcacaagatgcacaagctgtggtgggaaaccctcagtttacctttggagtcttccctgcagatcgcagacctgtttccaggctgatgtttctggtgtgtaattgctagcgtttctgaagggttttcccaattgttttagccttgtgaagtattcttaattataacttgcctttcagcgatggtacatgacttgattcaacgtttggttctgaacttacacactgatgcgtttactcatctaacataatctgacagggcctcagcaagggagccatacatttttgtaacattttgatatgttttaatgcatctgacttagatcttactgaaataaagcacttttcaaagagaaaaaaaaaaaaaaaaaaaaaaa

SEQ ID NO: 1897 - DNA, 5307 bp, Homo sapiens
aatgctgtgagttccttgttaggcctctccttccgatgaaaagagaaaggaagaatggactacagccaccaaacgtccctagtcccatgtggacaagataaatacatttccaaaaatgaacttctcttgcatctgaagacctacaacttgtactatgaaggccagaatttacagctccggcaccgggaggaagaagacgagttcattgtggaggggctcctgaacatctcctggggcctgcgccggcccattcgcctgcagatgcaggatgacaacgaacgcattcgaccccctccatcctcctcctcctggcactctggctgtaacctgggggctcagggaaccactctgaagcccctgactgtgcccaaagttcagatctcagaggtggatgccccgccggagggtgaccagatgccaagctccacagactccaggggcctgaagcccctgcaggaggacaccccacagctgatgcgcacacgcagtgatgttggggtgcgtcgccgtggcaatgtgaggacgcctagtgaccagcggcgaatcagacgccaccgcttctccatcaacggccatttctacaaccataagacatccgtgttcacaccagcctatggctctgtcaccaacgtccgcatcaacagcaccatgaccaccccacaggtcctgaagctgctgctcaacaaatttaagattgagaattcagcagaggagtttgccttgtacgtggtccatacgagtggtgagaaacagaagctgaaggccaccgattacccgctgattgcccgaatcctccagggcccatgtgagcagatctccaaagtgttcctaatggagaaggaccaggtggaggaagtcacctacgacgtggcccagtatataaagttcgagatgccggtacttaaaagcttcattcagaagctccaggaggaagaagatcgggaagtaaagaagctgatgcgcaagtacaccgtgctccggctaatgattcgacagaggctggaggagatagccgagaccccagcaacaatctgagccatgagaacgaggggatctgggcaccccaggaaccgccattgcccataagacccccaggaagctaggcactttctttccatggaaacatttagacacaaacctccccagctccggccaagccatcatttgctacctggagctggatgtagaagtcagcagacagctccctatccctggacccctgccctccttttttctgctcacaaggacttttgattttagttataaggaggacccaaaatgtgtgtgtgtacatgtgtgtgcacacatggtacgtgtccatgtgcctacctgatactttcacatgtaattaaattccaggcaaccagcacaagagccgtgagcttggcacatgtgctgctcgtgagcaggaaaatcagaggagccactgatctgagtggtatttaggttgaaggaaagatttctcctctcaagtgccagggagcagccacacgtctgtctgtgtttagagagggaagagggttctccaggttcaccatttgggttgtttatatgttggtagaaattctccctgtatgcctagaaggatcagtgaatgtaagagccttggaaattaacaaaataacagccacataaccttgcggcaagtctgatggaaagaaaaagataaaccatccgtggggtagatgcaataagcccacgtatttttacactggaaacgttgattgttttaaatgacaaagacatatgtgatgttctatgtggaaacctgtgaagagtggattctgcctccatctctgcctccatggctacctttaggagacagagaagatcctgtgtgtttctctgtacccagctgacagcctgtctctatggcgcttccttgagtggaaggaaatgtctcaagaaacaaagatctcgctggtgcgtacacagtgctgaccagctagtgtggccagggcctggtggcctggtggccaggaagtttcaggttgaagggaaatgtcgaggctacctgcagatatgacaggtgccttgaacgcagcccatcttcatgtcatcaaaggtcttcctgcacttgaagctggggcgatgtttgcagtcaagaccattctttccaacctctgggttcttgcaagttgccctcaccttgtgtgtggagatgcattccaagaatgaagcctcatcttgctactgagtgtggggttcagggaagctctttaggccacctggtgaaggtgcatggggaggatggagcttctcctcagctcctctgagcagccacctatgtgatctttaaatccaaccccaatgggagaaaagggcaagaacagtctgtgccctgggactcctatcaggaagcttgacaggcagctgggcatcagtgcagctgatatcgtttgaggagggagacagatgcttggacctgggtgcctggctatggagattgaccaagcaagatcaggagctcctgatagcaggcgtctttgagcctagctggggtagaggcactgcccatctcttctccaccttctctccacagaatgtttgcagagctgggcagttgaggaaaggacagcccctggttggtgcctccaaaggaaggtggacttttttggtggagacgtttctgccctgggcaccctcctgcccccgattcatacctatggcttcttgagaaggctcacagctgtggtcttaacgtagactgcagaaagatggcatgcggcccctggcatttcgccaagggttttatagcaagtctccttcctccatagggacagcagcaccagccctgtggggcatggagtggaagcccagaagggcttctgcaagctgcacagaactggggtaagaagacaaagagtagccaccgggagaggcttcctttgttacagctgggaaagaacagttctgtgaatgcaaacacctcctgagttttgcaattgagaaaatgatttggagaacttctcttctggtaatttttattttgaatgttcagggccttagttggccccagtaattctccttggaggacttgggagaagaatttccacaaagcaaactactaaccactagctcttactggacagcgatttctggcttataagagttctctttgatttgcactagcactacgatagtgttagatggggaaatactgcaacatgtccagttggccagatcactttccaagggagcgatactaaggcagactcagctttttaaagatgggaggtcaggaggtggaagtgagaggagatcccatctcacacaacacacttccacgtaatgcagaccacacttttccattttgtcctgccctcttgagaggtcatttctcacgtcctaagaacctgatcagaaattttggaagggttctttgaaatagcagcagttgaaacagagacactttgccacagtgtggagcagattttctcactggtatcacatggtcttgcagttttgaactcttcgaccgatttgtgggagtttatgtaattgcgtgcaatgaacctgaaattgtgtaaaggacaaaagaccagtttatagggttgggttttttttccaacttgtgaaaagcagtttagctgcatctgtctccccaccacccccaccccgggaggggcttatgttacaaggtgatcaagtgaaggaaaaacctgagcctatctggctgggatggtggaattaagcacaaggtcacattctctgtgatcacatgagagggaaggtgatgacttaaatggcagggggtggggattatcttggggagaggctgaaaagcacaaaagatagtcttccctgtacgtattggtgaagaacgtgcacaaggctggatggacttcaacttggagttgagttgaggcaagaggatttctggatattagtcacccatctgcaagaaaaatgctgaggcctcgggtcaagattttgatctgagacatgctgatgcttcaaggagaaatattttcacaatcctctcttccctcaccagaagagaacagtactctctcctagaaacctctaggtaaacacattttatcctaatatcggtagcatataatgccccccccaaaatatctgttttccatgcaaaaaagtctcaacaagaagtctgtggagttgagtggttacttcaaagtgtcaggagagtgaagaaattggccacagaagagcaagaagctctcttaagaaaagggaattctctttaaagaaaccaccaccaacaacaaaacaaccaaaaaccatgttttatgtcaaagctctgtagcacagagaatgtggtgtcacagatacatcgccgagagaggtttctttctttcttttttttttttttgagacagagtctggttctgtttcccaggctggagtgcagtggtgggatctcagctcactgcaacatccgcctctggggttcaagtgattctcctgtctcagcctcccaagtagctggaattacagggacccgccaccacgcccggctaatttttttgtgtggttttagtagaggtggggtttcaccatcttggccaggctggtcttgaactcctgacctcgtgatccacccgcctaggcctcccaaagtgttgggattacaggcgtgagccactgtgcccagccaaaagagaaatttctacatgaacaaggcaatttcagtgtcttacagcggccaaaccatgacgtgaagaatgagataggagacaggagatcaccataagcgtccctgatatagcagcacacattttcacgtttccacttaaatcgttttgcacaaagtcttgcttcgctcagatgagatgagatatgatttcctagagatgtaaaaataagaatgaatgtggcgcccccttcttccagatgtaatagaaagctctgccctatcacaaggggggtgttgaagcgccccttgtgttttaactgtatttaactgagcacaagatgcacaagctgtggtgggaaaccctcagtttacctttggagtcttccctgcagatcgcagacctgtttccaggctgatgtttctggtgtgtaattgctagcgtttctgaagggttttcccaattgttttagccttgtgaagtattcttaattataacttgcctttcagcgatggtacatgacttgattcaacgtttggttctgaacttacacactgatgcgtttactcatctaacataatctgacagggcctcagcaagggagccatacatttttgtaacattttgatatgttttaatgcatctgacttagatcttactgaaataaagcacttttcaaagagaaaaaaaaaaaaaaaaaaaaaaa

SEQ ID NO: 1898 - DNA, 5426 bp, Homo sapiens
ggggaggaagaaaggcgaaggcaaggcgaaggggtggagagtgatatgaagagcgagagaaaagagaggacagcggacgagcagatccggtatctggaatcccggcgcctagaacgtgtttttcgggagagcaaaggctgtgtctacggcaggctggggatatagcctctccttccgatgaaaagagaaaggaagaatggactacagccaccaaacgtccctagtcccatgtggacaagataaatacatttccaaaaatgaacttctcttgcatctgaagacctacaacttgtactatgaaggccagaatttacagctccggcaccgggaggaagaagacgagttcattgtggaggggctcctgaacatctcctggggcctgcgccggcccattcgcctgcagatgcaggatgacaacgaacgcattcgaccccctccatcctcctcctcctggcactctggctgtaacctgggggctcagggaaccactctgaagcccctgactgtgcccaaagttcagatctcagaggtggatgccccgccggagggtgaccagatgccaagctccacagactccaggggcctgaagcccctgcaggaggacaccccacagctgatgcgcacacgcagtgatgttggggtgcgtcgccgtggcaatgtgaggacgcctagtgaccagcggcgaatcagacgccaccgcttctccatcaacggccatttctacaaccataagacatccgtgttcacaccagcctatggctctgtcaccaacgtccgcatcaacagcaccatgaccaccccacaggtcctgaagctgctgctcaacaaatttaagattgagaattcagcagaggagtttgccttgtacgtggtccatacgagtggtgagaaacagaagctgaaggccaccgattacccgctgattgcccgaatcctccagggcccatgtgagcagatctccaaagtgttcctaatggagaaggaccaggtggaggaagtcacctacgacgtggcccagtatataaagttcgagatgccggtacttaaaagcttcattcagaagctccaggaggaagaagatcgggaagtaaagaagctgatgcgcaagtacaccgtgctccggctaatgattcgacagaggctggaggagatagccgagaccccagcaacaatctgagccatgagaacgaggggatctgggcaccccaggaaccgccattgcccataagacccccaggaagctaggcactttctttccatggaaacatttagacacaaacctccccagctccggccaagccatcatttgctacctggagctggatgtagaagtcagcagacagctccctatccctggacccctgccctccttttttctgctcacaaggacttttgattttagttataaggaggacccaaaatgtgtgtgtgtacatgtgtgtgcacacatggtacgtgtccatgtgcctacctgatactttcacatgtaattaaattccaggcaaccagcacaagagccgtgagcttggcacatgtgctgctcgtgagcaggaaaatcagaggagccactgatctgagtggtatttaggttgaaggaaagatttctcctctcaagtgccagggagcagccacacgtctgtctgtgtttagagagggaagagggttctccaggttcaccatttgggttgtttatatgttggtagaaattctccctgtatgcctagaaggatcagtgaatgtaagagccttggaaattaacaaaataacagccacataaccttgcggcaagtctgatggaaagaaaaagataaaccatccgtggggtagatgcaataagcccacgtatttttacactggaaacgttgattgttttaaatgacaaagacatatgtgatgttctatgtggaaacctgtgaagagtggattctgcctccatctctgcctccatggctacctttaggagacagagaagatcctgtgtgtttctctgtacccagctgacagcctgtctctatggcgcttccttgagtggaaggaaatgtctcaagaaacaaagatctcgctggtgcgtacacagtgctgaccagctagtgtggccagggcctggtggcctggtggccaggaagtttcaggttgaagggaaatgtcgaggctacctgcagatatgacaggtgccttgaacgcagcccatcttcatgtcatcaaaggtcttcctgcacttgaagctggggcgatgtttgcagtcaagaccattctttccaacctctgggttcttgcaagttgccctcaccttgtgtgtggagatgcattccaagaatgaagcctcatcttgctactgagtgtggggttcagggaagctctttaggccacctggtgaaggtgcatggggaggatggagcttctcctcagctcctctgagcagccacctatgtgatctttaaatccaaccccaatgggagaaaagggcaagaacagtctgtgccctgggactcctatcaggaagcttgacaggcagctgggcatcagtgcagctgatatcgtttgaggagggagacagatgcttggacctgggtgcctggctatggagattgaccaagcaagatcaggagctcctgatagcaggcgtctttgagcctagctggggtagaggcactgcccatctcttctccaccttctctccacagaatgtttgcagagctgggcagttgaggaaaggacagcccctggttggtgcctccaaaggaaggtggacttttttggtggagacgtttctgccctgggcaccctcctgcccccgattcatacctatggcttcttgagaaggctcacagctgtggtcttaacgtagactgcagaaagatggcatgcggcccctggcatttcgccaagggttttatagcaagtctccttcctccatagggacagcagcaccagccctgtggggcatggagtggaagcccagaagggcttctgcaagctgcacagaactggggtaagaagacaaagagtagccaccgggagaggcttcctttgttacagctgggaaagaacagttctgtgaatgcaaacacctcctgagttttgcaattgagaaaatgatttggagaacttctcttctggtaatttttattttgaatgttcagggccttagttggccccagtaattctccttggaggacttgggagaagaatttccacaaagcaaactactaaccactagctcttactggacagcgatttctggcttataagagttctctttgatttgcactagcactacgatagtgttagatggggaaatactgcaacatgtccagttggccagatcactttccaagggagcgatactaaggcagactcagctttttaaagatgggaggtcaggaggtggaagtgagaggagatcccatctcacacaacacacttccacgtaatgcagaccacacttttccattttgtcctgccctcttgagaggtcatttctcacgtcctaagaacctgatcagaaattttggaagggttctttgaaatagcagcagttgaaacagagacactttgccacagtgtggagcagattttctcactggtatcacatggtcttgcagttttgaactcttcgaccgatttgtgggagtttatgtaattgcgtgcaatgaacctgaaattgtgtaaaggacaaaagaccagtttatagggttgggttttttttccaacttgtgaaaagcagtttagctgcatctgtctccccaccacccccaccccgggaggggcttatgttacaaggtgatcaagtgaaggaaaaacctgagcctatctggctgggatggtggaattaagcacaaggtcacattctctgtgatcacatgagagggaaggtgatgacttaaatggcagggggtggggattatcttggggagaggctgaaaagcacaaaagatagtcttccctgtacgtattggtgaagaacgtgcacaaggctggatggacttcaacttggagttgagttgaggcaagaggatttctggatattagtcacccatctgcaagaaaaatgctgaggcctcgggtcaagattttgatctgagacatgctgatgcttcaaggagaaatattttcacaatcctctcttccctcaccagaagagaacagtactctctcctagaaacctctaggtaaacacattttatcctaatatcggtagcatataatgccccccccaaaatatctgttttccatgcaaaaaagtctcaacaagaagtctgtggagttgagtggttacttcaaagtgtcaggagagtgaagaaattggccacagaagagcaagaagctctcttaagaaaagggaattctctttaaagaaaccaccaccaacaacaaaacaaccaaaaaccatgttttatgtcaaagctctgtagcacagagaatgtggtgtcacagatacatcgccgagagaggtttctttctttcttttttttttttttgagacagagtctggttctgtttcccaggctggagtgcagtggtgggatctcagctcactgcaacatccgcctctggggttcaagtgattctcctgtctcagcctcccaagtagctggaattacagggacccgccaccacgcccggctaatttttttgtgtggttttagtagaggtggggtttcaccatcttggccaggctggtcttgaactcctgacctcgtgatccacccgcctaggcctcccaaagtgttgggattacaggcgtgagccactgtgcccagccaaaagagaaatttctacatgaacaaggcaatttcagtgtcttacagcggccaaaccatgacgtgaagaatgagataggagacaggagatcaccataagcgtccctgatatagcagcacacattttcacgtttccacttaaatcgttttgcacaaagtcttgcttcgctcagatgagatgagatatgatttcctagagatgtaaaaataagaatgaatgtggcgcccccttcttccagatgtaatagaaagctctgccctatcacaaggggggtgttgaagcgccccttgtgttttaactgtatttaactgagcacaagatgcacaagctgtggtgggaaaccctcagtttacctttggagtcttccctgcagatcgcagacctgtttccaggctgatgtttctggtgtgtaattgctagcgtttctgaagggttttcccaattgttttagccttgtgaagtattcttaattataacttgcctttcagcgatggtacatgacttgattcaacgtttggttctgaacttacacactgatgcgtttactcatctaacataatctgacagggcctcagcaagggagccatacatttttgtaacattttgatatgttttaatgcatctgacttagatcttactgaaataaagcacttttcaaagag

SEQ ID NO: 1899 - DNA, 2314 bp, Homo sapiens
cgcgcgcacagagcgagctcttgcagcctccccgcccctcccgcaacgctcgaccccaggattcccccggctcgcctgcccgccatggccgacaaggaagcagccttcgacgacgcagtggaagaacgagtgatcaacgaggaatacaaaatatggaaaaagaacaccccttttctttatgatttggtgatgacccatgctctggagtggcccagcctaactgcccagtggcttccagatgtaaccagaccagaagggaaagatttcagcattcatcgacttgtcctggggacacacacatcggatgaacaaaaccatcttgttatagccagtgtgcagctccctaatgatgatgctcagtttgatgcgtcacactacgacagtgagaaaggagaatttggaggttttggttcagttagtggaaaaattgaaatagaaatcaagatcaaccatgaaggagaagtaaacagggcccgttatatgccccagaacccttgtatcatcgcaacaaagactccttccagtgatgttcttgtctttgactatacaaaacatccttctaaaccagatccttctggagagtgcaacccagacttgcgtctccgtggacatcagaaggaaggctatgggctttcttggaacccaaatctcagtgggcacttacttagtgcttcagatgaccataccatctgcctgtgggacatcagtgccgttccaaaggagggaaaagtggtagatgcgaagaccatctttacagggcatacggcagtagtagaagatgtttcctggcatctactccatgagtctctgtttgggtcagttgctgatgatcagaaacttatgatttgggatactcgttcaaacaatacttccaaaccaagccactcagttgatgctcacactgctgaagtgaactgcctttctttcaatccttatagtgagttcattcttgccacaggatcagctgacaagactgttgccttgtgggatctgagaaatctgaaacttaagttgcattcctttgagtcacataaggatgaaatattccaggttcagtggtcacctcacaatgagactattttagcttccagtggtactgatcgcagactgaatgtctgggatttaagtaaaattggagaggaacaatccccagaagatgcagaagacgggccaccagagttgttgtttattcatggtggtcatactgccaagatatctgatttctcctggaatcccaatgaaccttgggtgatttgttctgtatcagaagacaatatcatgcaagtgtggcaaatggcagagaacatttataatgatgaagaccctgaaggaagcgtggatccagaaggacaagggtcctagatatgtctttacttgttgtgattttagactccccttttttcttctcaaccctgagagtgatttaacactggttttgagacagactttattcagctatccctctatataataggtaccaccgataatgctattagcccaaaccgtgggtttttctaaatattaataggggggcttgattcaacaaagccacagacttaacgttgaaattttcttcaggaattttctagtaacccaggtctaaagtagctacagaaaggggaatattatgtgtgattatttttcttcttatgctatatccccaagtttttcagactcatttaagtaaaggctagagtgagtaaggaatagagccaaatgaggtaggtgtctgagccatgaagtataaatactgaaagatgtcacttttattcaggaaatagggggagttcaagtcgtatagattcctactcgaaaatcttgacacctgactttccaggatgcacattttcatacgtagaccagtttcctcttggtttcttcagttaagtcaaaacaacacgttcctctttccccatatattcatatatttttgctcgttagtgtatttcttgagctgttttcatgttgtttatttcctgtctgtgaaatggtgtttttttttttgttgttggttttttttttttttttttaacttgggaccaccaagttgtaaagatgtatgtttttacctgacagttataccacaggtagactgtcaagttgagaagagtgaatcaataacttgtatttgttttaaaaattaaattaatccttgataagagttgctttttttttttaggagttagtccttgaccactagtttgatgccatctccattttgggtgacctgtttcaccagcaggcctgttactctccatgactaactgtgtaagtgcttaaaatggaataaattgcttttctacataaaaaaaaa

SEQ ID NO: 1900 - DNA, 6853 bp, Homo sapiens
gccaggccgcgtccgccatagtacctggcttggaggtgtcgccgccgctcggtgagagcccccgagcggcagggggccaacacaaaaagggagccggagaagccctagccgctgcccagcagcttgcgggcgtgttctcgcggttccgggcctcaaggcgacggaaacgaaaggcgagcgaagcgcggaggatccggcgagaagaagcgtcagggagcctcggcggtgtccccggggtccgccgaagccacccggccgccggctggggcccggggtggtgaggaagtgctccgaggcctcgccgaggcctagcgccggctttgtgtccgaggcggcggcggcggcggggggaggcggagccgggggcggcctgcgggaaggcctctcctccgccgaccgcgcgttttcggcctaggccgtggggccgctcgtggcctccggggagcaggcgccaggggtttgtgtgcggtgggggcctgggcctgggcctggggaagctgacgccggtcgtccggaagccaggaggaggcgtgaggccgctcgtggactccgggcctaggccctctcccctcaaccttctcccggggcctgggtcaccccaatccacggagagagagacccgccgggaggtgcggccgcgctatggacccctgaccccgtggggtcgctcggactcttaacgtgtggactgaccgctactgactgcaccgccaatccccccgtctctgccggccccttagcatgagcgagggggacccagccgggtgacattgtgcccgttggcggattctcgatttcccctcttccccgtcctcgtcctcctcctcccccatgaagtgattctgagtatcggggggtctctggattattgttctgacgaacccctgcttgtggttggggggtatttaatctgaggccttagggtccttcggtgtctttgagtgttttgtgtgtacatattttgctcttaaagtttataaatatacgtatattgagagtgtccacgtctcctcgctgaaccttaggaatcccttggcaccatgtcctgtgtgcattataaattttcctctaaactcaactatgataccgtcacctttgatgggctccacatctccctctgcgacttaaagaagcagattatggggagagagaagctgaaagctgccgactgcgacctgcagatcaccaatgcgcagacgaaagaagaatatactgatgataatgctctgattcctaagaattcttctgtaattgttagaagaattcctattggaggtgttaaatctacaagcaagacatatgttataagtcgaactgaaccagcgatggcaactacaaaagcaattgatgactcttccgcgtctatttctctggcccagcttacaaagactgccaatctggctgaagccaatgcttctgaagaagataaaattaaagcaatgatgtcgcaatctggccatgaatacgacccaatcaattacatgaagaaacctctaggtccaccacctccatcttacacgtgtttccgttgtggtaaacctggacattatattaagaattgcccaacaaatggggataaaaactttgaatctggtcctaggattaaaaagagcactggaattcccagaagtttcatgatggaagtgaaagatcctaatatgaaaggtgcaatgcttaccaacactggaaaatatgcaataccaactatagatgcagaagcatatgcaattgggaagaaagagaaacctcccttcttaccagaggagccatcttcttcctcagaagaagatgatcctatcccagatgaattgttgtgtctcatctgcaaggatattatgactgatgctgttgtgattccctgctgtggaaacagttactgtgatgaatgtataagaacagcactcctggaatcagatgagcacacatgtccgacgtgtcatcaaaatgatgtttctcctgatgctttaattgccaataaatttttacgacaggctgtaaataacttcaaaaatgaaactggctatacaaaaagactacgaaaacagttacctcctccaccacccccaataccacctccgagaccactgattcagaggaacctacaacctctgatgagatctccgatatcaagacaacaagatcctcttatgattccagtgacatcttcatcaactcacccagctccgtctatatcttcattaacttctaatcagtcttccttggcccctcctgtgtctggaaatccgtcttctgctccagctcctgtacctgatataactgcaacagtatccatatcagttcattcagaaaaatcagatggaccttttcgggattctgataataaaatattgccagctgcagctcttgcatcagagcactcaaagggaacctcctcaattgcaattaccgctcttatggaagagaagggttaccaggtgcctgttcttggaaccccatctttgcttggacagtcattattgcatggacagttgatccccacaactggtccagtaagaataaatactgctcgtccaggtggtggtcgaccaggctgggaacattccaacaaacttggctatctggtttctccaccacaacaaattagaagaggggagaggagctgctacagaagtataaaccgtgggcgacaccacagcgaaagatcacagaggactcaaggcccgtcactaccagcaactccagtctttgtacctgttccaccacctcctttgtatccgcctcctccccatacacttcctctccctccgggtgttcctcctccacagttttctcctcagtttcctcctggccagccaccacccgctgggtatagtgtccctcctccagggtttcctccagctcctgccaatttatcaacaccttgggtatcatcaggagtgcagacagctcattcaaataccatcccaacaacacaagcaccacctttgtccagggaagaattctatagagagcagcgacgactaaaagaagaggaaaagaaaaagtccaagctagatgagtttacaaatgattttgctaaggaattgatggaatacaaaaagattcaaaaggagcgtaggcgctcattttccaggtctaaatctccctatagtggttcttcgtattcaagaagttcatatacttattctaaatcaagatctggttcaacacgttcacgctcttattctcgatcattcagccgctcacattctcgttcctattcacggtcacctccataccccagaagaggcagaggcaagagccgcaattaccgttcacggtctagatctcatggatatcatcgatctaggtcaaggtcacccccttacagacgctatcattcacgatcaagatctcctcaagcgtttaggggacagtctcctaataaacgtaatgtacctcaaggggaaacagaacgtgaatattttaatagatacagagaagttccaccaccatatgacatgaaagcatattatgggagaagtgttgactttagagacccatttgaaaaagaacgctaccgagaatgggagagaaaatatagagagtggtatgaaaaatattataaaggttatgctgctggagcacagcctagaccctcagcaaatagagagaacttttctccagagagatttttgccacttaacatcaggaattctcccttcacaagaggccgcagagaagactatgttggtgggcaaagtcatagaagtcgaaacataggtagcaactatccagaaaagctttcagcaagagatggtcacaatcagaaggataatacaaagtcaaaagagaaggagagtgaaaacgctccaggagatggtaaaggaaataagcataagaaacacagaaaaagaagaaaaggggaggaaagtgagggttttctgaacccagagttattagagacttctaggaaatcaagagaacctacaggtgttgaagaaaataaaacagactcattgtttgttctcccaagtagagatgatgccacacctgttagagatgaaccaatggatgcagaatcaatcacttttaaatcagtgtctgaaaaagacaagagagaaagggataaaccaaaagcaaagggtgataaaaccaaacggaagaatgatggatctgctgtgtccaaaaaagaaaatattgtaaaacctgctaaaggaccccaagaaaaagtagatggagaacgtgagagatctcctcgatctgaacctccaattaaaaaagccaaagaggagactccgaagactgacaatactaaatcatcatcttcctctcagaaggatgaaaaaatcactggaacccccagaaaagctcactctaaatcagcaaaagaacaccaagaaacaaaaccagtcaaagaggaaaaagtgaagaaggactattccaaagatgtcaaatcagaaaagctaacaactaaggaagaaaaggccaagaagcctaatgagaaaaacaaaccacttgataataagggagaaaaaagaaaaagaaaaactgaagaaaaaggcgtagataaagattttgagtcttcttcaatgaaaatctcgaaactagaagtgactgaaatagtgaaaccatcaccaaagcgcaaaatggaacctgatactgaaaaaatggataggacccctgaaaaggacaaaatttctttaagtgcgccagccaaaaaaatcaaactcaacagagaaactgggaagaaaattggaagtacagaaaatatatcaaacacaaaagaaccctctgaaaaattggagtcaacatctagcaaagttaaacaagaaaaagtcaaaggaaaggtcagacgaaaagtgactggaactgaaggatccagctcaactctggtggattacaccagtacgagctcaactggaggcagtcctgtgcggaaatctgaagaaaaaacagatacaaagcgaactgtgattaaaacgatggaagaatataataatgacaataccgcgccagctgaagatgttatcattatgattcaggttcctcaatccaaatgggataaagatgactttgaatctgaagaagaagatgttaaatccacacagcctatatcaagtgtaggaaaacctgctagtgttataaaaaatgttagtacaaagccatcaaatatagtcaagtatcctgagaaagaaagtgagccatccgagaaaattcagaaattcaccaaggacgtgagccatgaaatcatacaacatgaggttaaaagttcaaaaaactctgcatctagtgaaaaagggaaaaccaaagatcgagattattcagtgttggaaaaggagaaccctgaaaagaggaagaacagcactcagccagagaaagagagtaatttggaccgtctgaatgaacaaggaaattttaaaagtctgtctcaatcttccaaagaggctagaacgtcagataaacatgattccactcgtgcttcctcaaataaagacttcactcccaatagagacaaaaaaactgactatgacaccagagagtattcaagttccaaacgtagagatgaaaagaatgaattaacaagacgaaaagactctccttctcggaataaagattctgcatctggacagaaaaataaaccaagggaagagagagatttgcctaaaaaaggaacaggagattccaaaaaaagtaattctagtccctcaagagacagaaaacctcatgatcacaaagccacttatgatactaaacggccaaatgaagagacaaaatctgtagataaaaatccttgtaaggatcgtgagaagcatgtattagaagcaaggaacaataaagagtcaagtggcaataaactactttatatacttaacccaccagagacacaggttgaaaaagagcaaattactgggcaaattgacaagagtactgtcaagcctaaaccccagttaagtcattcctctagactttcctctgacttaactagagaaactgatgaagctgcttttgaaccagactataatgaaagtgacagtgaaagtaatgtttctgtaaaagaagaggaatcttcaggaaacatttctaaggacctgaaagataaaatagtggagaaagcaaaagagagcctggacacagcagcagttgtccaggtgggcataagcaggaatcagagccacagcagccccagcgtcagccccagcagaagccacagtccttctggaagccagacccgaagccacagtagcagtgccagctcagcagaaagtcaggacagcaagaagaagaagaaaaagaaggaaaagaaaaaacacaagaaacataaaaagcataagaagcataagaaacatgcaggcactgaagtggaattggaaaaaagccaaaaacacaaacacaagaaaaagaagtcaaagaagaacaaagataaagagaaggagaaggagaaagatgaccaaaaagtgaaatctgtcactgtgtaaaaagacagattttttaaattgacttaattactaagtcatctgtattaaattttgttataatgtaaagagattcaagccttgtaaataatgacatggaagaccctgtgctgcacttaaaatattgctgcttgattatttgatttttacatcagagctttataacacgaacttttgtacagaattgtgagttgtgaccatgtaacatgagaggttttgctagggcctattatttttaaccaccattaattagttggggtggagtttactgtaatgtgaaattttcacatttgaattttttaattgcctggcaaaagctgatataagttctaaaatatcagcagaatgatttgctgaattcattacaaccctgttatgtcactttttgattacaataaaagttttcagtaaacttttcaaaaaaaaaaaaaaaaaaa

SEQ ID NO: 1901 - DNA, 6751 bp, Homo sapiens
gccaggccgcgtccgccatagtacctggcttggaggtgtcgccgccgctcggtgagagcccccgagcggcagggggccaacacaaaaagggagccggagaagccctagccgctgcccagcagcttgcgggcgtgttctcgcggttccgggcctcaaggcgacggaaacgaaaggcgagcgaagcgcggaggatccggcgagaagaagcgtcagggagcctcggcggtgtccccggggtccgccgaagccacccggccgccggctggggcccggggtggtgaggaagtgctccgaggcctcgccgaggcctagcgccggctttgtgtccgaggcggcggcggcggcggggggaggcggagccgggggcggcctgcgggaaggcctctcctccgccgaccgcgcgttttcggcctaggccgtggggccgctcgtggcctccggggagcaggcgccaggggtttgtgtgcggtgggggcctgggcctgggcctggggaagctgacgccggtcgtccggaagccaggaggaggcgtgaggccgctcgtggactccgggcctaggccctctcccctcaaccttctcccggggcctgggtcaccccaatccacggagagagagacccgccgggaggtgcggccgcgctatggacccctgaccccgtggggtcgctcggactcttaacgtgtggactgaccgctactgactgcaccgccaatccccccgtctctgccggccccttagcatgagcgagggggacccagccgggtgacattgtgcccgttggcggattctcgatttcccctcttccccgtcctcgtcctcctcctcccccatgaagtgattctgagtatcggggggtctctggattattgttctgacgaacccctgcttgtggttggggggtatttaatctgaggccttagggtccttcggtgtctttgagtgttttgtgtgtacatattttgctcttaaagtttataaatatacgtatattgagagtgtccacgtctcctcgctgaaccttaggaatcccttggcaccatgtcctgtgtgcattataaattttcctctaaactcaactatgataccgtcacctttgatgggctccacatctccctctgcgacttaaagaagcagattatggggagagagaagctgaaagctgccgactgcgacctgcagatcaccaatgcgcagacgaaagaagaatatactgatgataatgctctgattcctaagaattcttctgtaattgttagaagaattcctattggaggtgttaaatctacaagcaagacatatgttataagtcgaactgaaccagcgatggcaactacaaaagcaattgatgactcttccgcgtctatttctctggcccagcttacaaagactgccaatctggctgaagccaatgcttctgaagaagataaaattaaagcaatgatgtcgcaatctggccatgaatacgacccaatcaattacatgaagaaacctctaggtccaccacctccatcttacacgtgtttccgttgtggtaaacctggacattatattaagaattgcccaacaaatggggataaaaactttgaatctggtcctaggattaaaaagagcactggaattcccagaagtttcatgatggaagtgaaagatcctaatatgaaaggtgcaatgcttaccaacactggaaaatatgcaataccaactatagatgcagaagcatatgcaattgggaagaaagagaaacctcccttcttaccagaggagccatcttcttcctcagaagaagatgatcctatcccagatgaattgttgtgtctcatctgcaaggatattatgactgatgctgttgtgattccctgctgtggaaacagttactgtgatgaatgtataagaacagcactcctggaatcagatgagcacacatgtccgacgtgtcatcaaaatgatgtttctcctgatgctttaattgccaataaatttttacgacaggctgtaaataacttcaaaaatgaaactggctatacaaaaagactacgaaaacagttacctcctccaccacccccaataccacctccgagaccactgattcagaggaacctacaacctctgatgagatctccgatatcaagacaacaagatcctcttatgattccagtgacatcttcatcaactcacccagctccgtctatatcttcattaacttctaatcagtcttccttggcccctcctgtgtctggaaatccgtcttctgctccagctcctgtacctgatataactgcaacagtatccatatcagttcattcagaaaaatcagatggaccttttcgggattctgataataaaatattgccagctgcagctcttgcatcagagcactcaaagggaacctcctcaattgcaattaccgctcttatggaagagaagggttaccaggtgcctgttcttggaaccccatctttgcttggacagtcattattgcatggacagttgatccccacaactggtccagtaagaataaatactgctcgtccaggtggtggtcgaccaggctgggaacattccaacaaacttggctatctggtttctccaccacaacaaattagaagaggggagaggagctgctacagaagtataaaccgtgggcgacaccacagcgaaagatcacagaggactcaaggcccgtcactaccagcaactccagtctttgtacctgttccaccacctcctttgtatccgcctcctccccatacacttcctctccctccgggtgttcctcctccacagttttctcctcagtttcctcctggccagccaccacccgctgggtatagtgtccctcctccagggtttcctccagctcctgccaatttatcaacaccttgggtatcatcaggagtgcagacagctcattcaaataccatcccaacaacacaagcaccacctttgtccagggaagaattctatagagagcagcgacgactaaaagaagagtctaaatctccctatagtggttcttcgtattcaagaagttcatatacttattctaaatcaagatctggttcaacacgttcacgctcttattctcgatcattcagccgctcacattctcgttcctattcacggtcacctccataccccagaagaggcagaggcaagagccgcaattaccgttcacggtctagatctcatggatatcatcgatctaggtcaaggtcacccccttacagacgctatcattcacgatcaagatctcctcaagcgtttaggggacagtctcctaataaacgtaatgtacctcaaggggaaacagaacgtgaatattttaatagatacagagaagttccaccaccatatgacatgaaagcatattatgggagaagtgttgactttagagacccatttgaaaaagaacgctaccgagaatgggagagaaaatatagagagtggtatgaaaaatattataaaggttatgctgctggagcacagcctagaccctcagcaaatagagagaacttttctccagagagatttttgccacttaacatcaggaattctcccttcacaagaggccgcagagaagactatgttggtgggcaaagtcatagaagtcgaaacataggtagcaactatccagaaaagctttcagcaagagatggtcacaatcagaaggataatacaaagtcaaaagagaaggagagtgaaaacgctccaggagatggtaaaggaaataagcataagaaacacagaaaaagaagaaaaggggaggaaagtgagggttttctgaacccagagttattagagacttctaggaaatcaagagaacctacaggtgttgaagaaaataaaacagactcattgtttgttctcccaagtagagatgatgccacacctgttagagatgaaccaatggatgcagaatcaatcacttttaaatcagtgtctgaaaaagacaagagagaaagggataaaccaaaagcaaagggtgataaaaccaaacggaagaatgatggatctgctgtgtccaaaaaagaaaatattgtaaaacctgctaaaggaccccaagaaaaagtagatggagaacgtgagagatctcctcgatctgaacctccaattaaaaaagccaaagaggagactccgaagactgacaatactaaatcatcatcttcctctcagaaggatgaaaaaatcactggaacccccagaaaagctcactctaaatcagcaaaagaacaccaagaaacaaaaccagtcaaagaggaaaaagtgaagaaggactattccaaagatgtcaaatcagaaaagctaacaactaaggaagaaaaggccaagaagcctaatgagaaaaacaaaccacttgataataagggagaaaaaagaaaaagaaaaactgaagaaaaaggcgtagataaagattttgagtcttcttcaatgaaaatctcgaaactagaagtgactgaaatagtgaaaccatcaccaaagcgcaaaatggaacctgatactgaaaaaatggataggacccctgaaaaggacaaaatttctttaagtgcgccagccaaaaaaatcaaactcaacagagaaactgggaagaaaattggaagtacagaaaatatatcaaacacaaaagaaccctctgaaaaattggagtcaacatctagcaaagttaaacaagaaaaagtcaaaggaaaggtcagacgaaaagtgactggaactgaaggatccagctcaactctggtggattacaccagtacgagctcaactggaggcagtcctgtgcggaaatctgaagaaaaaacagatacaaagcgaactgtgattaaaacgatggaagaatataataatgacaataccgcgccagctgaagatgttatcattatgattcaggttcctcaatccaaatgggataaagatgactttgaatctgaagaagaagatgttaaatccacacagcctatatcaagtgtaggaaaacctgctagtgttataaaaaatgttagtacaaagccatcaaatatagtcaagtatcctgagaaagaaagtgagccatccgagaaaattcagaaattcaccaaggacgtgagccatgaaatcatacaacatgaggttaaaagttcaaaaaactctgcatctagtgaaaaagggaaaaccaaagatcgagattattcagtgttggaaaaggagaaccctgaaaagaggaagaacagcactcagccagagaaagagagtaatttggaccgtctgaatgaacaaggaaattttaaaagtctgtctcaatcttccaaagaggctagaacgtcagataaacatgattccactcgtgcttcctcaaataaagacttcactcccaatagagacaaaaaaactgactatgacaccagagagtattcaagttccaaacgtagagatgaaaagaatgaattaacaagacgaaaagactctccttctcggaataaagattctgcatctggacagaaaaataaaccaagggaagagagagatttgcctaaaaaaggaacaggagattccaaaaaaagtaattctagtccctcaagagacagaaaacctcatgatcacaaagccacttatgatactaaacggccaaatgaagagacaaaatctgtagataaaaatccttgtaaggatcgtgagaagcatgtattagaagcaaggaacaataaagagtcaagtggcaataaactactttatatacttaacccaccagagacacaggttgaaaaagagcaaattactgggcaaattgacaagagtactgtcaagcctaaaccccagttaagtcattcctctagactttcctctgacttaactagagaaactgatgaagctgcttttgaaccagactataatgaaagtgacagtgaaagtaatgtttctgtaaaagaagaggaatcttcaggaaacatttctaaggacctgaaagataaaatagtggagaaagcaaaagagagcctggacacagcagcagttgtccaggtgggcataagcaggaatcagagccacagcagccccagcgtcagccccagcagaagccacagtccttctggaagccagacccgaagccacagtagcagtgccagctcagcagaaagtcaggacagcaagaagaagaagaaaaagaaggaaaagaaaaaacacaagaaacataaaaagcataagaagcataagaaacatgcaggcactgaagtggaattggaaaaaagccaaaaacacaaacacaagaaaaagaagtcaaagaagaacaaagataaagagaaggagaaggagaaagatgaccaaaaagtgaaatctgtcactgtgtaaaaagacagattttttaaattgacttaattactaagtcatctgtattaaattttgttataatgtaaagagattcaagccttgtaaataatgacatggaagaccctgtgctgcacttaaaatattgctgcttgattatttgatttttacatcagagctttataacacgaacttttgtacagaattgtgagttgtgaccatgtaacatgagaggttttgctagggcctattatttttaaccaccattaattagttggggtggagtttactgtaatgtgaaattttcacatttgaattttttaattgcctggcaaaagctgatataagttctaaaatatcagcagaatgatttgctgaattcattacaaccctgttatgtcactttttgattacaataaaagttttcagtaaacttttcaaaaaaaaaaaaaaaaaaa

SEQ ID NO: 1902 - DNA, 4270 bp, Homo sapiens
gcaggtggttgtgggtagcgcgcctgggagggagaaagaagtcgggggccgtggcgcgcagcccgcggggcctgaagggatgttcgaggacaagccccacgctgagggggcggcggtggtcgccgcagccggggaggcgctacaggccctgtgccaggagctgaacctggacgaggggagcgcggccgaagccctggacgactttactgccatccgaggcaactacagcctagagggagaagttacacactggttggcatgttcattatatgttgcatgccgcaaaagcattattcccacggttggaaagggtatcatggaaggcaactgtgtttcacttaccagaatactacgttcagctaaattaagtttaatacaattttttagtaaaatgaagaaatggatggacatgtcaaatctaccacaagaatttcgtgaacgtatagaaaggctagagagaaattttgaggtgtctactgtaatattcaaaaaatatgagccaatttttttagatatatttcaaaatccatatgaagaaccaccaaagttaccacgaagccggaagcagaggaggattccttgcagtgttaaggatctgtttaatttctgttggacactttttgtttatactaagggtaattttcggatgattggggatgacttagtaaactcttatcatttacttctatgctgcttggatctgatttttgccaatgcgattatgtgcccaaatagacaagacttgctaaatccatcatttaaaggtttaccatctgattttcatactgctgactttacggcttctgaagagccaccctgcatcattgctgtactgtgtgaactgcatgatggacttctcgtagaagcaaaaggaataaaggagcactactttaagccatatatttcaaaactctttgacaggaagatattaaaaggagaatgcctcctggacctttcaagttttactgataatagcaaagcagtgaataaggagtatgaagagtatgttctaactgttggtgattttgatgagaggatctttttgggagcagacgcagaagaggaaattggaacacctcgaaagttcactcgtgacaccccattagggaaactgacagcacaggctaatgtggagtataaccttcaacagcactttgaaaaaaaaaggtcatttgcaccttctaccccactgaccggacggagatatttacgagaaaaagaagcagtcattactcctgttgcatcagccacccaaagtgtgagccggttacagagtattgtggctggtctgaaaaatgcaccaagtgaccaacttataaatatttttgaatcttgtgtgcgtaatcctgtggaaaacattatgaaaatactaaaaggaataggagagactttctgtcaacactatactcaatcaacagatgaacagccaggatctcacatagactttgctgtaaacagactaaagctggcagaaattttgtattataaaatactagagactgtaatggttcaggaaacacgaagacttcatggaatggacatgtcagttcttttagagcaagatatatttcatcgttccttgatggcttgttgtttggaaattgtgctctttgcctatagctcacctcgtacttttccttggattattgaagttctcaacttgcaaccattttacttttataaggttattgaggtggtgatccgctcagaagaggggctctcaagggacatggtgaaacacctaaacagcattgaagaacagattttggagagtttagcatggagtcacgattctgcactgtgggaggctctccaggtttctgcaaacaaagttcctacctgtgaagaagttatattcccaaataactttgaaacaggaaatggaggaaatgtgcagggacatcttcccctgatgccaatgtctcctctaatgcacccaagagtcaaggaagttcgaactgacagtgggagtcttcgaagagatatgcaaccattgtctccaatttctgtccatgaacgctacagttctcctaccgcagggagtgctaagagaagactctttggagaggaccccccaaaggaaatgcttatggacaagatcataacagaaggaacaaaattgaaaatcgctccttcttcaagcattactgctgaaaatgtatcaattttacctggtcaaactcttctaacaatggccacagccccagtaacaggaacaacaggacataaagttacaattccattacatggtgtcgcaaatgatgctggagagatcacactgatacctctttccatgaatacaaatcaggagtccaaagtcaagagtcctgtatcacttactgctcattcattaattggtgcttctccaaaacagaccaatctgactaaagcacaagaggtacattcaactggaataaacaggccaaagagaactgggtccttagcactattttacagaaaggtctatcatttggcaagtgtacgcttacgtgatctatgtctaaaactggatgtttcaaatgagttacgaaggaagatatggacgtgttttgaattcactttagttcactgtcctgatctaatgaaagacaggcatttggatcagctcctcctttgtgccttttatatcatggcaaaggtaacaaaagaagaaagaacttttcaagaaattatgaaaagttataggaatcagccccaagctaatagtcacgtatatagaagtgttctgctgaaaagtattccaagagaagttgtggcatataataaaaatataaatgatgactttgaaatgatagattgtgacttagaagatgctacaaaaacacctgactgttccagtggaccagtgaaagaggaaagaggtgatcttataaaattttacaatacaatatatgtaggaagagtgaagtcatttgcactgaaatacgacttggcgaatcaggaccatatgatggatgctccaccactctctccttttccacatattaaacaacagccaggctcaccacgccgcatttcccagcagcactccatttatatttccccgcacaagaatgggtcaggccttacaccaagaagcgctctgctgtacaagttcaatggcagcccttctaagagtttgaaagatatcaacaacatgataaggcaaggtgagcagagaaccaagaagcgagtaatagccatcgatagtgatgcagaatcccctgccaaacgcgtctgtcaagaaaatgatgacgttttactgaaacgactacaggatgttgtcagtgaaagagcaaatcattaatgttgttcttgtttctatgataaaagcactttcagattgttctgcagaaagttggagctctgtccttcaaaccttttagccctatagatgataaatatcactgggttataagaaaaaattgcacaaaaattatgtgctttttaaaatatttatccaaaatgtagttgacagagatgtattttgagttggattggaaaggaatattttaagtgccttttaaaaatactaatagtccggccaggcgctgtggctcacgcctgtaatcccaggactttgggaggccaaggcgggcagatcaccggaggtcaggagttcgagaccagcctgaccaacatggagaaaccccatctctactaaaaatacaaaattagccgggtgtggtggcgcatgcctgtaatcccagctacttgggaggctgaggcagaattgcttgaacccaggaagcggaggttgtggtgagccaaggttgcgccactgcactccagcctgggcaacaagagtaaaactccatctcaaaaaatatatatatatatataaatagggaattttttttaatgtttgctccttgagttttcaagatgaaataaggagaaaccccataactttttagctctcttttaaaaataaatgtctccttctgtgttctgtaatatgaggataaataatctacttttgatagcatgctttgagatatttgtattcttaatttaatattgaaggaaggggttggttcccatagtacctggccagagggttatataccatcctgtctctggcccactgtggtaattccacatccaggtaccaccgccattcagagttgtctcaccccttctcgtgccttttctctccttgagctttataaacagatttgtacctgagccccagtgctacactcatccttgctttccagccctaagccatctcagcctgatgtcacaacccaataaatggggcactttcttcttttgtaaactattatca

SEQ ID NO: 1903 - DNA, 4903 bp, Homo sapiens
gtcgtttgcggcggcgcaggcgcggtgcgggcggcggacgggcgggcgcttcgccgtttgaatggctgcgggcccgggccctcacctcacctgaggtccggccgcccaggggtgcgctatgccgtcgggaggtgaccagtcgccaccgcccccgcctccccctccggcggcggcagcctcggatgaggaggaggaggacgacggcgaggcggaagacgccgcgccgcctgccgagtcgcccacccctcagatccagcagcggttcgacgagctgtgcagccgcctcaacatggacgaggcggcgcgggccgaggcctgggacagctaccgcagcatgagcgaaagctacacgctggagggaaatgatcttcattggttagcatgtgccttatatgtggcttgcagaaaatctgttccaactgtaagcaaagggacagtggaaggaaactatgtatctttaactagaatcctgaaatgttcagagcagagcttaatcgaattttttaataagatgaagaagtgggaagacatggcaaatctacccccacatttcagagaacgtactgagagattagaaagaaacttcactgtttctgctgtaatttttaagaaatatgaacccatttttcaggacatctttaaataccctcaagaggagcaacctcgtcagcagcgaggaaggaaacagcggcgacagccctgtactgtgtctgaaattttccatttttgttgggtgctttttatatatgcaaaaggtaatttccccatgattagtgatgatttggtcaattcttatcacctgctgctgtgtgctttggacttagtttatggaaatgcacttcagtgttctaatcgtaaagaacttgtgaaccctaattttaaaggcttatctgaagattttcatgctaaagattctaaaccttcctctgaccccccttgtatcattgagaaactgtgttccttacatgatggcctagttttggaagcaaaggggataaaggaacatttctggaaaccctatattaggaaactttatgaaaaaaagctccttaagggaaaagaagaaaatctcactgggtttctagaacctgggaactttggagagagttttaaagccatcaataaggcctatgaggagtatgttttatctgttgggaatttagatgagcggatatttcttggagaggatgctgaggaggaaattgggactctctcaaggtgtctgaacgctggttcaggaacagagactgctgaaagggtgcagatgaaaaacatcttacagcagcattttgacaagtccaaagcacttagaatctccacaccactaactggtgttaggtacattaaggagaatagcccttgtgtgactccagtttctacagctacgcatagcttgagtcgtcttcacaccatgctgacaggcctcaggaatgcaccaagtgagaaactggaacagattctcaggacatgttccagagatccaacccaggctattgctaacagactgaaagaaatgtttgaaatatattctcagcatttccagccagacgaggatttcagtaattgtgctaaagaaattgccagcaaacattttcgttttgcggagatgctttactataaagtattagaatctgttattgagcaggaacaaaaaagactaggagacatggatttatctggtattctggaacaagatgcgttccacagatctctcttggcctgctgccttgaggtcgtcactttttcttataagcctcctgggaattttccatttattactgaaatatttgatgtgcctctttatcatttttataaggtgatagaagtattcattagagcagaagatggcctttgtagagaggtggtaaaacaccttaatcagattgaagaacagatcttagatcatttggcatggaaaccagagtctccactctgggaaaaaattagagacaatgaaaacagagttcctacatgtgaagaggtcatgccacctcagaacctggaaagggcagatgaaatttgcattgctggctcccctttgactcccagaagggtgactgaagttcgtgctgatactggaggacttggaaggagcataacatctccaaccacattatacgataggtacagctccccaccagccagcactaccagaaggcggctatttgttgagaatgatagcccctctgatggagggacgcctgggcgcatgcccccacagcccctagtcaatgctgtccctgtgcagaatgtatctggggagactgtttctgtcacaccagttcctggacagactttggtcaccatggcaaccgccactgtcacagccaacaatgggcaaacggtaaccattcctgtgcaaggtattgccaatgaaaatggagggataacattcttccctgtccaagtcaatgttggggggcaggcacaagctgtgacaggctccatccagcccctcagtgctcaggccctggctggaagtctgagctctcaacaggtgacaggaacaactttgcaagtccctggtcaagtggccattcaacagatttccccaggtggccaacagcagaagcaaggccagtctgtaaccagcagtagtaatagacccaggaagaccagctctttatcgcttttctttagaaaggtataccatttagcagctgtccgccttcgggatctctgtgccaaactagatatttcagatgaattgaggaaaaaaatctggacctgctttgaattctccataattcagtgtcctgaacttatgatggacagacatctggaccagttattaatgtgtgccatttatgtgatggcaaaggtcacaaaagaagataagtccttccagaacattatgcgttgttataggactcagccgcaggcccggagccaggtgtatagaagtgttttgataaaagggaaaagaaaaagaagaaattctggcagcagtgatagcagaagccatcagaattctccaacagaactaaacaaagatagaaccagtagagactccagtccagttatgaggtcaagcagcaccttgccagttccacagcccagcagtgctcctcccacacctactcgcctcacaggtgccaacagtgacatggaagaagaggagaggggagacctcattcagttctacaacaacatctacatcaaacagattaagacatttgccatgaagtactcacaggcaaatatggatgctcctccactctctccctatccatttgtaagaacaggctcccctcgccgaatacagttgtctcaaaatcatcctgtctacatttccccacataaaaatgaaacaatgctttctcctcgagaaaagattttctattacttcagcaacagtccttcaaagagactgagagaaattaatagtatgatacgcacaggagaaactcctactaaaaagagaggaattcttttggaagatggaagtgaatcacctgcaaaaagaatttgcccagaaaatcattctgccttattacgccgtctccaagatgtagctaatgaccgtggttcccactgaggttagtctcttgtattaaactcttcacaaaatctgtttagcagcagcctttaatgcatctagattatggagcttttttccttaatccagctgatgagttacagcctgttagtaacatgaggggacattttggtgagaaatgggacttaactccttccagtgtccttagaacattttaattcatcccaactgtctttttttccctaccattcagtgattactgtcaaggctgcttagaatccaaacttggatttttgactctggcaaagcttttagaaatactgcaagaaaatgatgtgtacccaaacgtgagcataggaggcttctgttgacgtactccaacagaagaactgtgtttcaagttcaatcctacctgttttgtggtcagctgtagtcctcataaaaagcaaaacaaaaattaggtattttgtcctaaaacacctggtaggagtgtgtgattttttgcattcctgacaaaggagagcacacccaggtttggaggtcctaggtcattagccctcgtctcccgttccctttgtgcacatcttccctctccccattcggtgtggtgcagtgtgaaaagtccttgattgttcgggtgtgcaatgtctgagtgaacctgtataagtggaggcactttagggctgtaaaatgcatgattttgtaacccagattttgctgtatatttgtgatagcactttctacaatgtgaactttattaaatacaaaacttccaggctaaacatccaatattttctttaatgcttttatatttttttaaaatgttaaaacccctatagccaccttttgggaatgttttaaattctccagttttttgttatatagggatcaaccagctaagaaaagattttaatcaagttgaattgaggggattaatatgaaaacttatgacctcttcctttaggagggagttatctaaaagaaatgtctattaaggtgatatatttaaaaatatttttgggtgttcctggcagtttaaaaaaattggttggagaatttaggtttttattagtaccatagtaccatttatacaaattagaaaatgttatttaacagctgaattatctatacatatctttattaatcactattgttccagcagttttcaagtcaaattaataatcttattagggagaaaattcaattgtaaattgaatcagtataaacaaagttactaggtaacttcatattgctgagagaaatatggaacttacattgttcaattagaatagtgttctgcaaaaatatttataaaacttctcaagatactgctactgtaattttatatgaagataagtgtatttttcaataaagcatttataaattaaaaaaaaaaaaaaaaaa

SEQ ID NO: 1904 - DNA, 2576 bp, Homo sapiens
ggcgcatgcgcagattggggaaggttctggaagacggcagagctgccgccattttgcgggaagaggaggctctgtacctgcagtgctgcttttcttgcctagactctaggaactatccgagctccactccccacaacatactcaaaggaacggagagaaccgggacccccctgcggggacccggaactgatctgacaggatggcatctgatgactttgacatagtgattgaggccatgctggaagctccctataaaaaagaagaggatgagcaacaaaggaaagaagttaaaaaggattatcctagcaataccaccagcagcaccagcaacagtggcaatgagaccagtggaagcagcaccatcggggagacaagcaatcgtagtcgagatcgggatcggtatagacggagaaatagtcggagccgaagtccaggtcggcagtgtcgtcaccgtagccgtagctgggatcgtcgacatggtagtgagtcgcgaagtcgggaccatcgtcgtgaggatcgtgtgcattacaggagtcctccacttgccactggttataggtatggacacagtaagagtcctcatttcagagagaagagcccagtcagggagccagttgataatctgagtcctgaggagcgtgatgcccgcacagttttctgtatgcagttagctgcccgaattcggcctcgagatctggaggactttttctctgctgtaggcaaggttcgcgatgtacgtatcatctcagatcggaactcacgtcgttctaagggcattgcctacgtggaattctgtgaaatccagtctgtgccactggccattgggctgactgggcagcggttgctgggagtgcctatcattgtacaggcttcacaggcagagaaaaaccgactggcagccatggccaacaacctgcaaaagggcaatggtggaccaatgcgcctctatgtgggttccctgcacttcaatatcactgaagacatgctccggggcatctttgagccctttggtaaaattgataatattgtcctgatgaaggactcagatacaggccgctctaaaggttatggtttcatcacgttctctgattctgagtgtgcccggcgggccctggaacagttgaatgggtttgagcttgctggtcgacctatgagggttggccatgtgactgagcgactggatggtggcacagacatcacttttcctgatggggaccaggagctggatctgggatcagcaggtggacgttttcagctcatggcaaaactggcagaaggcgctggaatccaactgccaagcactgctgctgctgctgctgccgccgccgcccaggctgctgccttgcaactgaatggagcagttcccttgggggccctgaatccagcagctctgactgctctgagtccagccctgaaccttgcctcccagtgtttccagctctccagcctctttaccccccagaccatgtaaatcagtggcacagtatactgcctccttgtgcctctggatcctgccacttcacatctactcttccatggccccatttctccattttgtggaccaagccatcctgagggcatggacattgtctctgaggaaattggggccacccttaagataccaagaaaagctcctgcccatggtcccactggaaatggactctgctgagcaaagccaccagttgaagagaacagaatccacacctgcattgaatacctgtttctccatgtgtatcgtctctgagattaccttcttgccctttccaacaccttagtgattcctcaatttctcccccattgggaaggccatagggcatactgaaggaactgacctctctccttttcctgtacctttaacctttagtctgtcaaggaaaacccttaggacctctgaatcaagaggactgagtttgtgggtgaaccttgaaggtgctctttctgctacaagggccctgggagatagcatggacgtgcattgagaagccagcctcagaccttagcttgaagcagcttgaggccagacctactgtagcctcagcatcttgctaggaggcatggaagtgatctatcctgccaggaggcctcagagtgatctgtcctgccaggaggtgtgagagtgatctgtcctgtgaggcatttaggggctttcaggaatttagtaaaaggtggagtatgcctttccagtatcttccatcttcctttgtatacttgtccttcctcccatttcctccctttggcccgaggtaggaggatggagggaggctgctactctaccacttcctgtgtgcctctactgtggcctcaaccctggcaattatagctactcccatcccttacctgggcatgtgtgagcccttctcactggattttatacccttgtgtctgtgtacataaatatatatacatatatatatacataaaaactttgtacaaaaggcaagcctcctccttgtggcagctgttgcccatttgtgtgtggtctttgttgtgtgtctgacaacttctcattagcccaacttatgatgtttctagggatataaaacattagtaacatcaaaaaaaaaaaaaaaaaaaaa

SEQ ID NO: 1905 - DNA, 3639 bp, Homo sapiens
gcggcgctgggtcggtggcggaggctgaggagaaggaggagcgggccgtggaggcttcgccgcctaggtactgctataaccagaatttggtagaaaaaggatttacttgttggggccctcttgataaaaagagatgtggggggattctcgacctgctaacagaactggaccttttcgtgggagccaagaagaaaggtttgctcccgggtggaacagggattatcctcctcctccccttaagagtcatgctcaagagagacactctggcaactttcctggcagagattcacttccctttgatttccaggggcattcggggcctccttttgcaaatgtagaggagcattctttcagctatggagctagagacggaccgcatggtgactatcgaggaggggagggacctggacatgatttcagggggggagatttttcgtcttctgatttccagagcagagattcatcacagttggacttcaggggtagggacatacattctggggattttcgggatagagaaggaccacctatggactataggggtggagatggtacttctatggattatagaggtagggaggcacctcatatgaactacagagacagggatgctcacgctgttgacttcagaggtagggatgctcctccatctgacttcaggggccggggcacttatgatttagattttagaggccgggatggatcccatgcagattttaggggaagggatttatcagatttggattttagggccagagaacagtcccgttctgattttaggaatagagatgtatctgatttggactttagagacaaagacggaacacaagtagactttagaggccgaggttcaggtactactgatctagactttagggacagggatacgccacattcagatttcagaggtagacaccgatctaggactgatcaggattttaggggcagagagatgggatcttgtatggaatttaaagatagggagatgccccctgtggatccaaatattttggattacattcagccctctacacaagatagagaacattctggtatgaatgtgaacaggagagaagaatccacacatgaccatacgatagaaaggcctgcttttggcattcagaagggagaatttgagcattcagaaacaagagaaggagaaacacaaggtgtagcctttgaacatgagtctccagcagactttcagaacagccaaagtccagttcaagaccaagataagtcacagctttctggacgtgaagagcagagttcagatgctggtctgtttaaagaagaaggcggtctggactttcttgggcggcaagacaccgattacagaagcatggagtaccgtgatgtggatcataggctgccaggaagccagatgtttggctatggccagagcaagtcttttccagagggcaaaactgcccgagatgcccaacgggaccttcaggatcaagattataggaccggcccaagtgaggagaaacccagcaggcttattcgattaagtggggtacctgaagatgccacaaaagaagagattcttaatgcttttcggactcctgatggcatgcctgtaaagaacttgcagttgaaggagtataacacaggttacgactatggctatgtctgcgtggagttttcactcttggaagatgccatcggatgcatggaggccaaccagggaactctaatgatccaggacaaagaagttaccctggagtatgtatcaagcctggatttttggtactgcaaacgatgtaaggcaaacattggtgggcaccgatcttcctgttcattctgcaagaacccaagagaagtgacagaggccaagcaagaattaataacctaccctcagcctcagaaaacatccataccagcaccattggaaaaacagcccaaccagcccctaagaccagctgataaggaacctgaacccaggaagagggaagaaggccaagagtcacgcttaggacatcaaaagagagaagcagaaaggtatctgcctccttctcgaagggaagggccaactttccgaagagaccgagagagggagtcatggtctggagagacacgccaggatggagagagcaaaactatcatgctaaagcgtatctatcgttccacaccacctgaggtgatagtggaagtgctggagccctatgtccgccttactactgccaacgtccgtatcatcaagaacagaacaggccctatggggcatacctatggctttattgacctcgactcccatgcggaagctcttcgtgtggtgaagatcttacagaaccttgatccgccatttagcattgatgggaagatggtagctgtaaacctggccactggaaaacgaagaaatgattctggggaccattctgaccacatgcattactatcagggtaaaaaatatttccgagataggaggggaggtggcagaaattcagactggtcttcagatacaaatcgacaaggacaacagtcatcatctgactgctacatatatgattctgctactggctactattatgaccccttggcaggaacttattatgaccccaatacccagcaagaagtctatgtgccccaggatcctggattacctgaggaagaagagatcaaggaaaaaaaacccaccagtcaaggaaagtcaagtagcaagaaggaaatgtctaaaagagatggcaaggagaaaaaagacagaggagtgacgaggtttcaggaaaatgccagtgaagggaaggcccctgcagaagacgtctttaagaagcccctgcctcctactgtgaagaaggaagagagtccccctccacctaaagtggtaaacccactgatcggcctcttgggtgaatatggaggagacagtgactatgaggaggaagaagaggaggaacagacccctcccccacagccccgcacagcacagccccagaagcgagaggagcaaaccaagaaggagaatgaagaagacaaactcactgactggaataaactggcttgtctgctttgcagaaggcagtttcccaataaagaagttctgatcaaacaccagcagctgtcagacctgcacaagcaaaacctggaaatccaccggaagataaaacagtctgagcaggagctagcctatctggaaaggagagaacgagagggaaagtttaaaggaagaggaaatgatcgcagggaaaagctccagtcttttgactctccagaaaggaaacggattaagtactccagggaaactgacagtgatcgtaaacttgttgataaagaagatatcgacactagcagcaaaggaggctgtgtccaacaggctactggctggaggaaagggacaggcctgggatatggccatcctggattggcttcatcagaggaggctgaaggccggatgaggggccccagtgttggagcctcaggaagaaccagcaaaagacagtccaacgagacttatcgagatgctgttcgaagagtcatgtttgctcgatataaagaactcgattaagaaaggagacaagttccatgggatacaacctccctcttgttttgtttgtctctccttttcttttgttactgttcttgctgctagaacttttttaaataaactttttttcaatgtgaaaaaaaaaaaaaaaaaaa

SEQ ID NO: 1906 - DNA, 2787 bp, Homo sapiens
gcacagacgagatctcgatcgaaggcgagatggcggacgtgctagatcttcacgaggctgggggcgaagatttcgccatggatgaggatggggacgagagcattcacaaactgaaagaaaaagcgaagaaacggaagggtcgcggctttggctccgaagaggggtcccgagcgcggatgcgtgaggattatgacagcgtggagcaggatggcgatgaacccggaccacaacgctctgttgaaggctggattctctttgtaactggagtccatgaggaagccaccgaagaagacatacacgacaaattcgcagaatatggggaaattaaaaacattcatctcaacctcgacaggcgaacaggatatctgaaggggtatactctagttgaatatgaaacatacaaggaagcccaggctgctatggagggactcaatggccaggatttgatgggacagcccatcagcgttgactggtgttttgttcggggtccaccaaaaggcaagaggagaggtggccgaagacgcagcagaagtccagaccggagacgtcgctgacaggtcctctgttgtccaggtgttctcttcaagattccatttgaccatgcagccttggacaaataggactggggtggaacttgctgtgtttatatttaatctcttaccgtatatgcgtagtatttgagttgcgaataaatgttccatttttgttttctacatttaatgttactttcctgtcctaaaattgaaagttctaaagcatagcaaggctgtatggatcattgtgaagatacttctagggactgaactctatgtatttcttttttttcttttttttgagatagagtcttgctgtgttacccagggtggattgcagctgatcatagctcactgcagcttcaaactcttgggctcaagccatccttctgcctcactgtccctagtagttgggattacaggcacatgccaccatgcccagctaaatttttaatatttttgtagagatggggtcttgctgtgttacctgggctagttatgtgagtttctatattagacatagtctcaagtttcaggtagggtttaaagtagagacactggtcagtatttcttttttggggggaactaggagagcaggagtagaagtgagatgttaagatcttatggcactaaagacttactattctgttcctacatactctgttaggatcagatagatgttatagaaatgccttttgtttctcctgcccttcttgatgtcacagttttttgtacttccagctgtctaaaggcatgaatctcctcttggagcattctcccagacccttctttagaagagtctatactaagttcttggtgccctcttcggcagccaagggtgaaggccccatagaggagaggatccaaaggagcattgaggaggcccaagaggaaaaggatgtggctcaggctgggagggacttcagttagcatggtgggggagaaccagtaccacatacccagtaggtaataaggtgtccagcagaggatgaaggtcagcaagataagcagggccagtctcagggcccggagacgaacacggggacaattgtcaaaggagcgggggagggcaaattcaccagcaggggctaggaatttagaaaatatactgtaattcagacactcagcttctgatctgagtatagggtgaattgatggaggggcatagctagtgagacagagctcgcctcctacaaggaggagaatgttgcaaaccgttttccccttcccaacctgggactatatgatttcttacccccagggattatgatagaaatatgaagccaccaagtctagacttgatggtgttcaagaataaataatactgattgcctccctagtccttgtccagctaactcagctgtttataattgaagggattcaacaaaattatctctagcatcaggtgctagacatggttagaatctcaccatggtttagtgactggtagatagctattaggtaggtagataaataaatgatgctagaggcaacaggtctagggttaaggattaaggcctgggaattggagtctcaccatggctccccttccttgtctggggcctggacacactgaggacaatgcggctatagcagatggccatggcagtcagtggcagcagaaagaggcagcagaaggtgaagaggttataggtggtctcttgccattgagccttgaagctgcctttggtgacacactgagtgaaagggactgggccagctcagtggaccgtgtggaacaggaacagctggagtggagttgaggactattagaactggttcccctcaccacccaacctacccacctatgtcatactgtctcctcccaattcatccttaattccaagtgaagcagcacagtgctgagaaacagttcatccatggtgccatgttaaagaagttggaaatatatcttgaaaatcctatcttccttttaggcttgaatatgatgctgaacagtaagtttgttaaatcttggaacttaaaacaatcctgctttctcaagtactattctaacattgcgctttataagggatgatatttctaccacctcactcatatttttagctgaaatgattttcctggtatgtctgttattttgtggaaaaagaaatattgtgtaaaatgggtgctgccaaaattccaggccattttgcagggactctgaagtgacctttagtagtaatagtcttatgtgcagtaactataatggtaaagaatgttaaataataaaatttaacattttccaaatgct

SEQ ID NO: 1907 - DNA, 6948 bp, Homo sapiens
tccagcaggcctgcttctggagttgggagatgtcagcctgctgggagggggtggggggaggaggaagaggtggggctctactctgattaattaccttaggcattcaggggtggggcttccttcagccatctgcctgagatatgggagggagctggagaaagaaggagggggagagactgccagagaggaagagaaaagaaaggaagaaacattagaaagaaaaaggaaggaaaacggtataaagagagatcaattacccacccttaaatagctagattggggggggaggggggtggaaaagaaagctgtggaggtgtgccccagcacggctgctttgaaaggtttatcatctatccgtttggtttatggagaaaaagaaaatggtaactcagggtaaccaggagccgacaacaactcctgacgcaatggttcagccttttactaccatcccatttccaccacctccgcagaatggaattcccacagagtatggggtgccacacactcaagactatgccggccagaccggtgagcataacctgacactctacggaagtacgcaagcccacggggagcagagcagcaactcacccagcacacaaaatggatctcttacgcagacagaaggtggagcacagacagacggccagcagtcacagacacaaagtagtgaaaattcagagagtaaatctaccccgaaacggctgcatgtctctaatattcctttccgcttccgggaccctgacctccggcagatgtttgggcagtttggcaaaatcctagatgtagaaataatctttaatgaacgtggctctaagggattcgggttcgtaactttcgagaatagtgctgatgcagacagggccagggagaaattacacggcaccgtggtagagggccgtaaaatcgaggtgaataatgctacagcacgtgtaatgaccaataagaagatggtcacaccatatgcaaatggttggaaattaagcccagtagttggagctgtatatggtccggagttatatgcagcatccagctttcaagcagatgtgtccctaggcaatgatgcagcagtgcccctatcaggaagagggggtatcaacacttacattcctttaatcattcctggcttcccttaccctactgcagccaccacggcagccgctttcagaggagcccatttgaggggcagagggcggacagtatatggtgcagtccgagcggtacctccaacagccatccccgcctatccaggggtggatatgcagcctacagatatgcacagcctgctactgcaaccgcagccaccgctgctgcagccgctgcagccgcttacagtgacggttatggcagggtgtacacagccgacccctaccatgcccttgcccctgccgctagctatggagttggcgctgtggcgagtttataccgaggtggctacagccgatttgccccctactgaagtgacgtgagacccctgcaaatgggacagccccccagttcatgaggcctggctattgcaatatttactagtagaggaactctatagcaagatgaagaggaaaaacaaacaaacaaacaaaaaaaaacacaaaaaaagaaagaatacttttttatacctcactatgttctttgaatatgtatttttcctttaaatttctgcctttaattcttttgttccaaagattgtgcatttttttctttttttttttaaactgtggtaaaaaaaaaaaaaataatgcatttccatgtctgtatgtccgtgcttagcttattctatcaatcacggaagaggcagtcaaggaggaaggagagacattaggagccgataaatgcatctgatcagaaatcagcagacagaattaccaaagtgtatctggtgctgaatgactgggggacaagcagaagtggaagagatctttctgcaacaggatattcttctagtcttctgagtttctggtctttgacaggcaattctggttggctgtggctggaatccacatgctgatagataggaatttgtgcttacaaagcaggagaattaaaaagacgctttcctctcctcttccctcctgtcttctccgttctttttacaatcatcttacacgcacagcctgagacagctggcatagtttttggaattatagtattgatatttccaaacgtgctctcagacagtggataataaacacctcattaggaaaccgatctcagaatgaactctggagtatgaaaaagatcatttctttttgttcctgtaacctagcattccttctaggcttcttctcctttaattgaaccacagcttagctcatgtattcttttattaacaccctgctctcatgtccataagattcaggaatttaggacccagggacagaaaagtgaataagccagtgaccagatttcccccagatgtcttgaggattagaagtacaaattgttgacagccattaaagagggtgaggaagggaaaaggaatattagaagatctggtatttcttacttttttcttgcctcagaaagtacaaagtttaaaaaatagaataaagaatctgctggggaaagatagagtaccaggtcctaggtcagtagtccctggaagttttggtgatgaggacatggaagggcaggcagaggcactttgtacttgctccaaagccataggaattttcatcttccagagcctttatgagtcacttctctatccacagtcttgagcctgtggctatcccgctgagcttctcactgtcctccaaaaacaccccgctgagcacccggaccactttgtacacattaacactacaggacataaaatgcagaggccctgagattgctgccctcccatattggaaggagggtctgcgatggcaagggtcttctatatcaccagaaagagtcgcgcagtgagtcactgccgttgccatctggctgtaattttctatgttatcaaggtaggagggagtgtttctcttctagctgttagatagaactgataaaagcaagtgtcctacagcatttcccaaatgaaggcattaggaaatagaaaagcacggtctttttggctccctggtctagtcacattggtactagggtgacctttcacccaagggacagctgctaaagggagtaattcagagacatggagcttctggttatgggtttgttttgggtttgtttttaactcctgcctccacacatgttcttgactgataactgactcatgtccctgaattaaaatgactgacctatgacagcatcaagcattctttgtaagcagagtgatatatctgagagggcgttgacctgttgtgtagaatacatatcctttcccccttcagaatcctgtctcgcctcgtaactgggagagaggctgtgcctgaaactaggggcgatgtcaaggaagctagaggcctcgatgcaattattactgactctggggaggaagacagagaataaggggacaccaactgcccagtccactggccatttttaagggtccccccaccccaagccaaagtttggtttgttgctgttaagacaatttttgttgtatgtatataaatattttagttagaggagcggggaatgggatgcgggctttcacagttctagggaatgggggcagggaggattttgcttttgcttttgctttgagggagaactttagctgactaaaaaaacagaagtttggggtcatgatcacaaaggggccattcccaaaagatggcaagccacgtattcagtggagactaggccaaattctaaatggttttatccatagcaggggagaataggagaatgagtttaagagtttttctcttcttttttcctagaaagaggtaaggataatgggaaaggtagagaaggcggctcccacagaccttttaagagaggcagaatcttgagcttgaggcaccttgagtgcatctcagttcagctggttctggctgaggcctccaaaggcaagctctgtgctttccagtggtttctgctgcatttccagggatggtgtttaacaccgcttcctccagctcccttttctaagaaagaataaatggagttctgctttttatgaaagggtctttggttttcagtgtcaacactgagaattggggctcttgcaagcatctggatttcacagtatcaacctccccgtcaccttttgaactttgagactccgtacggtcaacttcaccagaggcaggttgctcgaagcagcactgcttgtctgttcctgactctggttctcactgtattaaaaaagagagtcagaggagtctggcatttcgtgagtttgttagaggatgctggctgataattccagaaaacttactgatgctaaatcacagtacatgcatgattctttttcagctttactatagttcatgacctggactttctgtactcttggaagctgggctccttaaaggaggcctctagtgaacacctttatctccatgtccctcttagagcccagagagctgcccataggcattttccagaattcctcatgtcacctagttcaatttccattaactcagatcagccattgtgattcaccatttgtcaggctctcaggtttaacaaaacctactatcaccatcatccttcaacagccacagtctgaattgagccaacatttttttttctttgagaaagaagtggactggggcacaacttttagtctgaggggagctagtggaaatctagacaatagaagtcatcgatagcagcttttcctcaaatgtgtgactcctcaggggctaaactgctcttagcttagaattatgctttactagagatctagcagataagtgggttaatcactaccatcctgtaactagttatatagcttccagacatgagggagacatcaaacagggatggaagcaaccccaaggatatgcaagaagggcatgatgaacccccttccctctggcaggagaacaaggccaaccaagggacagactggaaagcacttagatgtttaaggaggagaaaggggaagctttgaccagtccttgccttttgccaagttcagccagttctccgctgcttgcaacctctagcgcagtaacatttgcagaattgcagattttcccccagatactaggaggaaagggactttggggggtggggaaggggtcgtggtgttttaaaagcataagttacctgtttgcactgttttaagataggaaaaaaaaatagtgggcaaggtgaacatcagacgtaaatttgtgtgtttttattttgtcatgctcttgaaaatgtttgaccatttgtagtatacacagtgaaacttgattctctgttgcataaaacactatatttttttggaaatgttactgtccaaaagcctcttccctccctttccttttcctatgtacttccttcatacttgctttactgatcagccaggcaatagccatccaagagctagagcatgaaacagggccctttccaagtaggctctgggtgtcctaagccagcgtgtgccctctggtttagtgagtgtaatagagtccctggcacctttctttgcaaatgaggctaacagaccagactgcagcaagttatcagattcctcaatcagatgcactaggagtgaggagcccagggatggagggggttcctgaagtattgcagttggctgtagtagctgagttcttttccatgttaccgaaactgtagccagttacagtttactcaggaaaacggtagatcaattcagccatggtagtgctggttggcagggattggtaacggagagaactgctcatcagccaaaactcaagccttgccttttaggaggccaccagcagagggacttggtcctccttgtctggtacttgtgtacatgccggtgacctgaggactccactcacactggcgagcaaaaagggagcagtgattctcttttctctccccaccccctgccctttgttaccaacaccagtttcccagggggtacatgagtttctgaatttttaaaaaatgtttttggtttggtttttctggggactgataagtgctttaagcaatgtccataccccgtcaagactcccagcttagtcattttcttgtatttttctgttcacagtatttgtgtgtgtgcttgttttggcagctcattttggctgtattatatattgagtgatgaattgatcctcttttttccctaagggatatgaattgtttttcttgtgttatattctgcttgtgaatagctggagcaaacctggggctgacacgcgtaagctagggctgcaaagcgagaagagagccggtggagtgtacttgtccctgacaggctgacctacctgagtctctgagcttttcagtccaaatctttgcaaggctcaaaatgccacagaacctctcctcttctccccactccccatggcagggaccggaccatccctacatgcaacatgctgttcctccagcccctcccattgccatggcaaaacaggtacctttggggcatgggggcattacatgggatgcttgtgtaatcgaccacctagccttctctctcccctcccgtcctcccccagaatcacttcctaggacacccgagctgcttgcccagggtcctgtttccctgctaactccagagaagcatcccagggctttgtgacagtctctaattcccttcccttctcgttaagaatcatattgtatagtagctttcagaccatacagtattcattgggttactcctattattatcaagtagctggaattgtgaaggtcggagtagttagatctttagcttttattccttatttttttgtattactctccatgtgtataaattattgatcatgttgctggcttttataaactctaagcgaaggaggagcactgcctcagcctttgcacatggtaatgaagcactgtttttaaataaaagagagaaacaccaaaaaaaaaaaaaaaaaaaaa

SEQ ID NO: 1908 - DNA, 6997 bp, Homo sapiens
tccagcaggcctgcttctggagttgggagatgtcagcctgctgggagggggtggggggaggaggaagaggtggggctctactctgattaattaccttaggcattcaggggtggggcttccttcagccatctgcctgagatatgggagggagctggagaaagaaggagggggagagactgccagagaggaagagaaaagaaaggaagaaacattagaaagaaaaaggaaggaaaacggtataaagagagatcaattacccacccttaaatagctagattggggggggaggggggtggaaaagaaagctgtggaggtgtgccccagcacggctgctttgaaaggtttatcatctatccgtttggtttatggagaaaaagaaaatggtaactcagggtaaccaggagccgacaacaactcctgacgcaatggttcagccttttactaccatcccatttccaccacctccgcagaatggaattcccacagagtatggggtgccacacactcaagactatgccggccagaccggtgagcataacctgacactctacggaagtacgcaagcccacggggagcagagcagcaactcacccagcacacaaaatggatctcttacgacagaaggtggagcacagacagacggccagcagtcacagacacaaagtagtgaaaattcagagagtaaatctaccccgaaacggctgcatgtctctaatattcctttccgcttccgggaccctgacctccggcagatgtttgggcagtttggcaaaatcctagatgtagaaataatctttaatgaacgtggctctaagggattcgggttcgtaactttcgagaatagtgctgatgcagacagggccagggagaaattacacggcaccgtggtagagggccgtaaaatcgaggtgaataatgctacagcacgtgtaatgaccaataagaagatggtcacaccatatgcaaatggttggaaattaagcccagtagttggagctgtatatggtccggagttatatgcagcatccagctttcaagcagatgtgtccctaggcaatgatgcagcagtgcccctatcaggaagagggggtatcaacacttacattcctttaatcagtctccctttagttcctggcttcccttaccctactgcagccaccacggcagccgctttcagaggagcccatttgaggggcagagggcggacagtatatggtgcagtccgagcggtacctccaacagccatccccgcctatccaggtgtggtttaccaggacggattttacggtgctgacctctatggtggatatgcagcctacagatatgcacagcctgctactgcaaccgcagccaccgctgctgcagccgctgcagccgcttacagtgacggttatggcagggtgtacacagccgacccctaccatgcccttgcccctgccgctagctatggagttggcgctgtggcgagtttataccgaggtggctacagccgatttgccccctactgaagtgacgtgagacccctgcaaatgggacagccccccagttcatgaggcctggctattgcaatatttactagtagaggaactctatagcaagatgaagaggaaaaacaaacaaacaaacaaaaaaaaacacaaaaaaagaaagaatacttttttatacctcactatgttctttgaatatgtatttttcctttaaatttctgcctttaattcttttgttccaaagattgtgcatttttttctttttttttttaaactgtggtaaaaaaaaaaaaaataatgcatttccatgtctgtatgtccgtgcttagcttattctatcaatcacggaagaggcagtcaaggaggaaggagagacattaggagccgataaatgcatctgatcagaaatcagcagacagaattaccaaagtgtatctggtgctgaatgactgggggacaagcagaagtggaagagatctttctgcaacaggatattcttctagtcttctgagtttctggtctttgacaggcaattctggttggctgtggctggaatccacatgctgatagataggaatttgtgcttacaaagcaggagaattaaaaagacgctttcctctcctcttccctcctgtcttctccgttctttttacaatcatcttacacgcacagcctgagacagctggcatagtttttggaattatagtattgatatttccaaacgtgctctcagacagtggataataaacacctcattaggaaaccgatctcagaatgaactctggagtatgaaaaagatcatttctttttgttcctgtaacctagcattccttctaggcttcttctcctttaattgaaccacagcttagctcatgtattcttttattaacaccctgctctcatgtccataagattcaggaatttaggacccagggacagaaaagtgaataagccagtgaccagatttcccccagatgtcttgaggattagaagtacaaattgttgacagccattaaagagggtgaggaagggaaaaggaatattagaagatctggtatttcttacttttttcttgcctcagaaagtacaaagtttaaaaaatagaataaagaatctgctggggaaagatagagtaccaggtcctaggtcagtagtccctggaagttttggtgatgaggacatggaagggcaggcagaggcactttgtacttgctccaaagccataggaattttcatcttccagagcctttatgagtcacttctctatccacagtcttgagcctgtggctatcccgctgagcttctcactgtcctccaaaaacaccccgctgagcacccggaccactttgtacacattaacactacaggacataaaatgcagaggccctgagattgctgccctcccatattggaaggagggtctgcgatggcaagggtcttctatatcaccagaaagagtcgcgcagtgagtcactgccgttgccatctggctgtaattttctatgttatcaaggtaggagggagtgtttctcttctagctgttagatagaactgataaaagcaagtgtcctacagcatttcccaaatgaaggcattaggaaatagaaaagcacggtctttttggctccctggtctagtcacattggtactagggtgacctttcacccaagggacagctgctaaagggagtaattcagagacatggagcttctggttatgggtttgttttgggtttgtttttaactcctgcctccacacatgttcttgactgataactgactcatgtccctgaattaaaatgactgacctatgacagcatcaagcattctttgtaagcagagtgatatatctgagagggcgttgacctgttgtgtagaatacatatcctttcccccttcagaatcctgtctcgcctcgtaactgggagagaggctgtgcctgaaactaggggcgatgtcaaggaagctagaggcctcgatgcaattattactgactctggggaggaagacagagaataaggggacaccaactgcccagtccactggccatttttaagggtccccccaccccaagccaaagtttggtttgttgctgttaagacaatttttgttgtatgtatataaatattttagttagaggagcggggaatgggatgcgggctttcacagttctagggaatgggggcagggaggattttgcttttgcttttgctttgagggagaactttagctgactaaaaaaacagaagtttggggtcatgatcacaaaggggccattcccaaaagatggcaagccacgtattcagtggagactaggccaaattctaaatggttttatccatagcaggggagaataggagaatgagtttaagagtttttctcttcttttttcctagaaagaggtaaggataatgggaaaggtagagaaggcggctcccacagaccttttaagagaggcagaatcttgagcttgaggcaccttgagtgcatctcagttcagctggttctggctgaggcctccaaaggcaagctctgtgctttccagtggtttctgctgcatttccagggatggtgtttaacaccgcttcctccagctcccttttctaagaaagaataaatggagttctgctttttatgaaagggtctttggttttcagtgtcaacactgagaattggggctcttgcaagcatctggatttcacagtatcaacctccccgtcaccttttgaactttgagactccgtacggtcaacttcaccagaggcaggttgctcgaagcagcactgcttgtctgttcctgactctggttctcactgtattaaaaaagagagtcagaggagtctggcatttcgtgagtttgttagaggatgctggctgataattccagaaaacttactgatgctaaatcacagtacatgcatgattctttttcagctttactatagttcatgacctggactttctgtactcttggaagctgggctccttaaaggaggcctctagtgaacacctttatctccatgtccctcttagagcccagagagctgcccataggcattttccagaattcctcatgtcacctagttcaatttccattaactcagatcagccattgtgattcaccatttgtcaggctctcaggtttaacaaaacctactatcaccatcatccttcaacagccacagtctgaattgagccaacatttttttttctttgagaaagaagtggactggggcacaacttttagtctgaggggagctagtggaaatctagacaatagaagtcatcgatagcagcttttcctcaaatgtgtgactcctcaggggctaaactgctcttagcttagaattatgctttactagagatctagcagataagtgggttaatcactaccatcctgtaactagttatatagcttccagacatgagggagacatcaaacagggatggaagcaaccccaaggatatgcaagaagggcatgatgaacccccttccctctggcaggagaacaaggccaaccaagggacagactggaaagcacttagatgtttaaggaggagaaaggggaagctttgaccagtccttgccttttgccaagttcagccagttctccgctgcttgcaacctctagcgcagtaacatttgcagaattgcagattttcccccagatactaggaggaaagggactttggggggtggggaaggggtcgtggtgttttaaaagcataagttacctgtttgcactgttttaagataggaaaaaaaaatagtgggcaaggtgaacatcagacgtaaatttgtgtgtttttattttgtcatgctcttgaaaatgtttgaccatttgtagtatacacagtgaaacttgattctctgttgcataaaacactatatttttttggaaatgttactgtccaaaagcctcttccctccctttccttttcctatgtacttccttcatacttgctttactgatcagccaggcaatagccatccaagagctagagcatgaaacagggccctttccaagtaggctctgggtgtcctaagccagcgtgtgccctctggtttagtgagtgtaatagagtccctggcacctttctttgcaaatgaggctaacagaccagactgcagcaagttatcagattcctcaatcagatgcactaggagtgaggagcccagggatggagggggttcctgaagtattgcagttggctgtagtagctgagttcttttccatgttaccgaaactgtagccagttacagtttactcaggaaaacggtagatcaattcagccatggtagtgctggttggcagggattggtaacggagagaactgctcatcagccaaaactcaagccttgccttttaggaggccaccagcagagggacttggtcctccttgtctggtacttgtgtacatgccggtgacctgaggactccactcacactggcgagcaaaaagggagcagtgattctcttttctctccccaccccctgccctttgttaccaacaccagtttcccagggggtacatgagtttctgaatttttaaaaaatgtttttggtttggtttttctggggactgataagtgctttaagcaatgtccataccccgtcaagactcccagcttagtcattttcttgtatttttctgttcacagtatttgtgtgtgtgcttgttttggcagctcattttggctgtattatatattgagtgatgaattgatcctcttttttccctaagggatatgaattgtttttcttgtgttatattctgcttgtgaatagctggagcaaacctggggctgacacgcgtaagctagggctgcaaagcgagaagagagccggtggagtgtacttgtccctgacaggctgacctacctgagtctctgagcttttcagtccaaatctttgcaaggctcaaaatgccacagaacctctcctcttctccccactccccatggcagggaccggaccatccctacatgcaacatgctgttcctccagcccctcccattgccatggcaaaacaggtacctttggggcatgggggcattacatgggatgcttgtgtaatcgaccacctagccttctctctcccctcccgtcctcccccagaatcacttcctaggacacccgagctgcttgcccagggtcctgtttccctgctaactccagagaagcatcccagggctttgtgacagtctctaattcccttcccttctcgttaagaatcatattgtatagtagctttcagaccatacagtattcattgggttactcctattattatcaagtagctggaattgtgaaggtcggagtagttagatctttagcttttattccttatttttttgtattactctccatgtgtataaattattgatcatgttgctggcttttataaactctaagcgaaggaggagcactgcctcagcctttgcacatggtaatgaagcactgtttttaaataaaagagagaaacaccaaaaaaaaaaaaaaaaaaaaa

SEQ ID NO: 1909 - DNA, 2038 bp, Homo sapiens
cgcccccttgttcccgcaagcccggaactgcccaaatcccgcccctcccctcccaaaaaaacacccctcatccagtctcttccagcctagagatcctggcctacccctccgccaaagcgcgcactgagtgcaaaccccagagtcaatccctgtcccggctccgccccccgcgtccgaatcccgcccagccgggccctcaagcccagtcgggactcgagcctagggaggcgaggttcccgcaccggatagcatgtttttggcccagaggagcctctgctctcttagcggtagagcaaaattcctgaagacaatttcttcttccaaaatcctcggattctctacttctgctaaaatgtcactgaaattcacaaatgcaaaacggattgaaggacttgatagtaatgtgtggattgaatttaccaaattggctgcagacccttctgttgtgaatcttggccaaggctttccagatatatcccctcctacatatgtaaaagaagaattatcaaagattgcagcaatcgatagcctgaatcagtatacacgaggctttggccatccatcacttgtgaaagctctgtcctatctgtatgaaaagctttatcaaaagcaaattgattcaaataaagaaatccttgtgacagtaggagcatatggatctctttttaacaccattcaagcattaattgatgagggagatgaagtcatactaatagtgcctttctatgactgctatgagcccatggtgagaatggctggagcaacacctgtttttattcccctgagatctaaacctgtttatggaaaaagatggtctagttctgactggacattagatcctcaagaactggaaagtaaatttaattccaaaaccaaagctattatactaaatactccacataacccacttggcaaggtgtataacagagaggaactgcaagtaattgctgacctttgcatcaaatatgacacactctgcatcagcgatgaggtttatgaatggcttgtatattctggaaataagcacttaaaaatagctacttttccaggtatgtgggagagaacaataacaataggaagtgctggaaagactttcagtgtaactggctggaagcttggctggtccattggtccaaatcatttgataaaacatttacagacagttcaacaaaacacgatttatacttgtgcaactcctttacaggaagccttggctcaagctttctggattgacatcaagcgcatggatgacccagaatgttactttaattctttgccaaaagagttagaagtaaaaagagatcggatggtacgtttacttgaaagtgttggcctaaaacccatagttcctgatggaggatacttcatcatcgctgatgtgtctttgctagatccagacctctctgatatgaagaataatgagccttatgactataagtttgtgaaatggatgactaaacataagaaactatcagccatccccgtttcagcattctgtaactcagagactaaatcacagtttgagaagtttgtgcgtttttgcttcattaaaaaagacagcacactggatgctgctgaagaaatcatcaaggcatggagtgtacagaagtcttgatttgtgcagaatggattaatgtttctgttagatgacctagtatggaattgttacttagtgctgccacctgctggatgttaaaaggtatttcagtacaactggaatttaaatatttccattgtttttccaaagcagttaacccaactcctaacaacattttcgggggatctgaccttttttttccagttgaaatgtattaacacaccttccacaatcattttataagagtcagcataacatagtggataagaaatgtgagatgtttaacctctcagtaactcggttctctcattataaaataggaataaaatcagtacctgtttcatatgaaggtcgtttctgagaattaaatggactaatgtatgcaaaaagcctggcaaacaataaacactcatctgactttagccggtaaaaaaaaaaaaa

SEQ ID NO: 1910 - DNA, 3877 bp, Homo sapiens
cgcccccttgttcccgcaagcccggaactgcccaaatcccgcccctcccctcccaaaaaaacacccctcatccagtctcttccagcctagagatcctggcctacccctccgccaaagcgcgcactgagtgcaaaccccagagtcaatccctgtcccggctccgccccccgcgtccgaatcccgcccagccgggccctcaagcccagtcgggactcgagcctagggaggcgaggttcccgcaccggataggaacattctgttgttttcctctgccatctagtggcaaaagaaagtaattttcctggttttttgaatggatagccataccttaaaaagcatccagattgcgcagtagtgctagcggcttcgcggttcagtcctcctaactgacagccgccactggtgctgagctgctaggaagcccctgtcggcgagcttgttggagcttgaacccactgtcacccctccgactcaccggcaaaaaaaaaaatggttgaagcagatcgcccaggaaagctcttcattggtgggcttaatacggaaacaaatgagaaagctcttgaaacagtatttggcaaatatggacgaatagtggaagtactcttgataaaagaccgtgaaaccaacaaatcaagaggatttgcttttgtcacctttgaaagcccagcagacgctaaggatgcagccagagacatgaatggaaagtcattagatggaaaagccatcaaggtggaacaagccaccaaaccatcatttgaaagaggtagacatggaccgcccccacctccaagaagtagaggtcctccaagaggttttggagctggaagaggaggaagtggaggaaccaggggacctccttcacgaggaggacacatggatgatggtggatattccatgaattttaacatgagttcttccaggggaccactcccagtaaaaagaggaccaccaccaagaagtgggggtccttctcctaagagatctgcaccttcaggactagttcgcagcagcagtggaatgggaggaagagctcctctatcacgtggaagagatagttatggaggtccacctcgaagggaaccgctcccctctcgtagagatgtttatttgtccccaagagatgatgggtattctactaaagacagctattcaagcagagattacccaagttctcgtgatacaagagattatgcaccaccaccacgagattatacttaccgtgattatggtcattccagttcacgtgatgactatccatcaagaggctatggcgatagagatggatatggtcgtgatcgtgactattcagatcatccaagtggaggttcctacagagattcatatgagagttatggtaactcacgtagtgctccacttacacgagggcccccgccatcttatggtggaagcagtcgctatgatgattatagcagctcacgtgatggatatggtggaagtcgagacagttactcaagcagccgaagtgatctctactcaagttgtgacagggttggcagacaagaaagagggcttcccccttctgtagaaagggggtacccttcttcacgtgattcctacagcagttcaagccgcggagcaccaagaggtgctggccctggaggaagccgatctgatagagggggaggcagaagcagatactagaaacaaacaaaactttggaccaaaatcccagttcaaagaaacaaaaaaaagagtggaaactattctatcataactacccaaggactactaaaaggaaaaattgtgttaccttttttaaattccctgttaagtcccttccgtaatttttatgttcttgtgaggaaaaaagtaaaacatgtttaattttatttgactttatgacattgcttttcaacaagcaaatgttaaatgtgttaagccttgtagtactagtgttgtaactttccaagtaaaggtgtccctaaagaccacttcctatctggtttttcccagtaaatgaggcaagcaattctaagatcttccacaaaacatctagccatctaaaatggagagatgaatcattctgcctatacaaacaagctagctattagagggtggttggagtatgctactcataagatttcagggtgttttctaactgaaatctcactgttctcagtatgcaaaacctgaaatcagatgcctatgtaaggaaagtgctattcacccagtaaacccaaaaaaagcaaatggataatgctggccattttgcctttctgacatttccttgggaatctgcaagaacctcccctttcccctcccacaataagaccatttaagtgtgtgctaaacaactacggaatactaaataaaaagtttggccaaaaccaaccatgaagctgcaaaggtgcttgctcttactctttcaaatttttgcaactctaatgtctcacttttaaaggaacagcttgattgcaaaggagaaaatagataagcaatgaatttatctccaacttcctaaaggcttatgacttctaaaaagtgaatctatcagcattccacatcagatttaaagcatcaaatgcctgtgaaacagcaaagatggttgaagattgtgctcattatgtttgtggagtgctgattgattcacagtagataacgctggcagtaagagaaatcaaatgctaagagttgttgaagcagaaggcggctgattgttggtaagtcagtgcagttgcataagcagtgctgtcagaattggtttggtgcaggcaatagattttgccttcaagggttcctgtggatctcaggaaggcatcagtgttgattaacactcataactagggagtgagtggtagttacttaagtaattgaccaaatggaaaaggggaagtaattaaggaaattggtaagtggaggtagtcaggaggttctcgtggtcctttacacagattttacagctttgggtttcattttgtttagctaaagtcatggggacaactcttcaatttagaacttaagatgaattataaaaatgatggatataagtggtagctctatctggtgaagtgtcttgtcagtaagtgaaacatttttttgtggtggcttatccacaaacagtttagttgtagaataaaacttatgagtgacatctggaaagtaacaaccatgctaagatggcaaacacactggaaacaattgggccacttggctttcttttgctgtattgttttataagcctgctttacctccccgtcttggaaacaagttttagtttattgctttggagactagagccaatagtgtaatgttctcaaaggaaacagacttgagttgttggattagaggaactaactcaacttctaattttttttgttgtaattatggcactgtcatgttttaacatttgcaactagggatagtaagtacaacatttttaactctcatttggcagactactactaatcacagaccacaagggtaatgaccaaatttatgtggttgttacacttccatagttgtcttagccgaatccttccatattcttatgattacttgggttaaagcttctgtgaggaccttttggctcttaagatatcctaaatatttaaaatatttagatatcctaaatataggatatagagtttgtaccaaatatgaatgaatattgttcaaagcaaggagtatgttaaaatgaccagacacctgtttgataaatagtttactgaactagcagacgtgtggaaaaagaatcagatcttgattcttctgggtttatactggttgtaaaacagaatgatattagaaaatgttttccttgtttaagtggtagttgaacatagaacttgggtattatagatcacttttcactttttggaatgttttgtattgaaacttaatacaactttaacatggc

SEQ ID NO: 1911 - DNA, 4083 bp, Homo sapiens
tcttcccatccacccgccgcttctttcctccatctagcgatttttattttttaagtgtctcttcctttttctttcttttcttttttattttttatatatattttttggcattgctttgcagatgttgggatgagagtcggagccgaataccaagctcggatccctgaatttgatccaggtgctacaaagtacacagataaagacaatggagggatgcttgtatggtctccatatcacagtatcccagatgccaaattggatgaatacattgcaattgcaaaggaaaagcatggctacaatgtggaacaggcacttggcatgttgttctggcataaacataacattgagaagtcccttgctgatctccctaatttcactccctttccggatgagtggacagtggaagataaagtcctatttgaacaagcctttagttttcatggaaagagctttcacaggattcagcaaatgcttccagataagacaattgcaagccttgtaaaatattactattcttggaaaaaaactcgctctaggacaagtttgatggatcgccaggctcgtaaactagctaatagacataatcagggtgacagtgatgatgatgtagaagaaacacatccaatggatgggaatgatagtgattatgatcccaaaaaagaagccaaaaaagagggtaatactgaacaacctgtccaaactagcaagattggacttggaagaagagagtatcagagtttacaacatcgccatcattctcagcgttctaagtgccgtccacctaagggcatgtatttaacccaggaagatgtggtagcagtttcctgtagtcccaatgcagccaacaccatcctgaggcaactggacatggagttgatctctctaaaacgtcaggttcagaatgctaagcaagtaaacagtgcacttaaacagaaaatggaaggtggaattgaagaattcaaacctcctgagtcaaatcagaaaattaatgcccgttggaccacagaggagcagcttctagcagtgcaaggtgtccgcaaatatggtaaagattttcaagctattgcagatgtaattggcaacaagactgttggccaagtgaagaacttctttgtaaactacaggcgtcggtttaacttagaggaggtattgcaggagtgggaagcagaacaaggaacccaggcttctaatggtgatgcttctactttaggggaggagacaaaaagtgcttctaatgtgccatcagggaagagcactgatgaagaagaggaggcacagaccccacaggctcctcggacactgggtccatcacctcctgccccatcatccactccaacaccaacagcccctattgccactctgaaccagcctccaccacttcttcgtccaacactgcctgctgccccggctcttcaccggcagcctcctccactccagcagcaggctcggttcatccagccccggccaactttaaatcagcctccaccacctcttattcgccctgctaattccatgccaccccgtctaaacccaagaccggtgttgtccacggttggtggtcaacagccaccatcacttattggaattcagacagattcacagtcctcactgcactaaaaattaaattggacacagctgcagtaacttttcaccccatcattataccagtgctcatctgactgatgaaaaagaggaaagaataatcatttctagatactgaggctgcgaactagttctgtggcagtggactagcataagtggatgtctaagaaatttttcagttcactagactaaaatgttttacaacaaaaagcctccagttagcctcctttctagagtatatgttcagcaatgtgatctcataaaaggaaaaacaaaagatttaagtattctatataccaagtttttgttttgtttttactgtatttattttattgaggttctttatattcctgcctcttcatagtcaaggctcttagtacaggaatattgacttaggaattgtgaaaactccttaagtttcttaagttaaggatgtttggcttttttctttaattttttaaaaaccattttcctatgttaggagtgcaagaatagccagcatttccgattttgacatatgttcattttatgcatatttaagaaattatagctgcatatcccttctttcaaaaaatgttgcttttttttttaaaggaattttaatatattcctttaaaagaaagcaatttaatcaattgcaaagcaattatataaaaccacaaagaatgtactgaacctactaaccctttaacatacagtttagggtcctagcgcagagtccttgtttaaaggtcattgactcatcatctgtcagtaatgagaggattggaagaataattttgcatacaaatgaggacttaatttgttgaaatataatctctttaagttccttgaaaatggagttggttttttttgtttctaaatgctatctgcttttaactagtagttgcctacatctggggacttcagagaagaattatattttgttagttaagtagacacagtggttatggaagcatttctttacagtaccctttacgtgtttggtttctgaacttaaaattgccctcatacttaataatatggtctgcatttaatatgaaaggtgttttattgataaatctattgtactatttggatacatttgtgtattccttgcagccaacctgtattcgtgggattggtgtagggttaaatcatcaacattatttcataaaataagaatttgttctgtgttatctaaagatgtatcagtatattgtcacagttgtgctgttaactaaaaatgctgagacccctttttatagaaaaacaaaaagacatcaagtcttcttaattcaacccataatcattaagtacttaacaaagaatattttacaagtgatagtatttcaacaatgtgtaattaatatttttgatacagtgatttcatattggaatcattatttgtgcaaagggacagacagatcacttagattgctatactagtggacataggctaaatgtttgcacattcacattcttatcacgtgtagaatacttcacaaaatagtcaacatctaaggccctaatttatgttttgaaagatcatgtgttcccaaagtattccctattgttggctccacagccttaaagtgctatagatttaaattcattgattagttttaatttttaattttagactgtgtatttccataaataccctacgtactggcatatttgaaactctttttccaggttaggtccttttctttctcattgaatcatcttaaatagttcttggccctgaatttagctgatttaaaattcttaatattcaagaatttatacttattttttccttaaaagccacaggggacagttaaatatcttaaaatatctaaaacattttttaaagcacttagattgtcttacgtatgtgcatactatacctttacagcgtttattgtcttgtctcttgtcagtagaccttcagtacacagtatgtgggatatgtcagtcaagttggtcagcaccagcatctgtccagctgttcagtatattgtgattcattaaaaaatctcttctatcccagacatgggccaaggtgctgtatctgagggatgtgctgtaatttgatttacatgcattagagcacacagtagaaaaacgttagcttcattagtaatatgacacatgtatatagtgagatgtctttattgtgtgctttgcatattttgtaaatattttgcacgtcattatttttcttttttgtttaagcagtgtttggcctggaagagtgatatgcttgctgcttaatcaaaggattaaagatttaaagatgtctatgtcttctatttttatataatttcatgttctatgaggaatttagtacctcttcactgtgaaattcgaaataatgatttttataaaagcaaaactagaaatcttttaatgacaattttcattaatttcagggttatcatttttgagaaatctacaccaaagtggttttttaaaattacataactaaaaataaaccacactgtggatacatcttat

SEQ ID NO: 1912 - DNA, 1535 bp, Homo sapiens
ttccggaggcggcggctgcggaactcccgtggaggggccggtgggccctcgggcctgacgatggcagtggccactgcggcggcagtactggccgctctgggcggggcgctgtggctggcggcccgccggttcgtggggcccagggtccagcggctgcgcagaggcggggaccccggcctcatgcacgggaagactgtgctgatcaccggggcgaacagcggcctgggccgcgccacggccgccgagctactgcgcctgggagcgcgggtgatcatgggctgccgggaccgcgcgcgcgccgaggaggcggcgggtcagctccgccgcgagctccgccaggccgcggagtgcggcccagagcctggcgtcagcggggtgggcgagctcatagtccgggagctggacctcgcctcgctgcgctcggtgcgcgccttctgccaggaaatgctccaggaagagcctaggctggatgtcttgatcaataacgcagggatcttccagtgcccttacatgaagactgaagatgggtttgagatgcagttcggagtgaaccatctggggcactttctactcaccaatcttctccttggactcctcaaaagttcagctcccagcaggattgtggtagtttcttccaaactttataaatacggagacatcaattttgatgacttgaacagtgaacaaagctataataaaagcttttgttatagccggagcaaactggctaacattctttttaccagggaactagcccgccgcttagaaggcacaaatgtcaccgtcaatgtgttgcatcctggtattgtacggacaaatctggggaggcacatacacattccactgttggtcaaaccactcttcaatttggtgtcatgggcttttttcaaaactccagtagaaggtgcccagacttccatttatttggcctcttcacctgaggtagaaggagtgtcaggaagatactttggggattgtaaagaggaagaactgttgcccaaagctatggatgaatctgttgcaagaaaactctgggatatcagtgaagtgatggttggcctgctaaaataggaacaaggagtaaaagagctgtctataaaactgcatatcagttatatctgtgatcaggaatggtgtggattgagaacttgttacttgaagaaaaagaattttgatattggaatagcctgctaagaggtacatgtgggtattttggagttactgaaaaattatttttgggataagagaatttcagcaaagatgttttaaatatatatagtaagtataatgaataataagtacaatgaaaaatacaattatattgtaaaattataactgggcaagcatggatgacatattaatatttgtcagaattaagtgactcaaagtgctatcgagaggtttttcaagtatctttgagtttcatggccaaagtgttaactagttttactacaatgtttggtgtttgtgtggaaattatctgcctggtgtgtgcacacaagtcttacttggaataaatttactggtacaattct

SEQ ID NO: 1913 - DNA, 2864 bp, Homo sapiens
gacattctaaatgcaaagctagactgagcaagggaagtgacaggaaatggagctggggagacaaaaatgtggataacaacaaaagaatttcaacaggtaaaaaaatgagtcaaacatctctcaaacagaaaaagaatgagcctggaatgaggtcctcaaaagagagtctagaagcagaaaaaagaaaggaatctgacaaaacaggagttcgtctgagcaatcagatgaggcgtgcagtcaatccgaatcactcgctgagatgttgccccttccagggtcactcgtcgtgtagacgctgcctttgtgcagctgagggaacagcccttggcccctgccacacaatacgtatttatattcacatgtgcctgttgtgggagcagggccagcagatcaccatgatgaggggatcacaagaatcatcactgcggaagacagactctcgagggtaccttgtgcgcagtcaatggtctagaatatcccggagcccatccaccaaggctccatccatagatgagcctagaagcaggaacaccagtgctaagctccccagcagctccacgagctcccggactccatccacctccccaagcctgcatgactcctcaccgccgccgctgtccgggcagccctcgctccagccacccgcgtcgccccagctgccccggtcgctggactcgcggcctcccacgcccccagagcccgatcctggctcccggcgcagcaccaaaatgcaagagaatccggaggcctgggcccaaggcatcgtgcgggaaatccgccagacccgggactcgcagccgctggaatattcgcgcacgtcccccaccgagtggaagtcctccagccagcgcagggggatctaccccgcctccacccagctggaccgcaactctctgtccgagcagcagcagcagcagcgggaggacgaggacgactacgaggctgcctactgggcatccatgaggtcgttctacgagaagaacccgagctgctcgcgcccctggccgcccaaacccaagaacgccatcaccattgctctctcatcctgcgcgctcttcaacatggtggacggcaggaaaatctacgagcaagagggtctggaaaagtacatggagtatcagctcaccaatgagaacgtcatcctgaccccgggcccggcgttccgcttcgtcaaggcactacagtatgtcaatgctagactccgtgatctatatcctgatgaacaggacttatttgatattgtactgatgactaataaccatgcccaagtgggagtgcggcttataaacagcgtcaatcactacggcttactgattgaccgcttctgtctgaccgggggaaaagaccccattggctatttgaaggcatatcttaccaacttgtatattgctgcagattctgaaaaagtgcaagaggcaatacaagaaggtattgcctctgcgacaatgtttgatggagccaaagacatggcttactgtgacactcagctccgtgtagcctttgatggggatgctgtcctcttctctgatgagtctgaacattttaccaaggagcatgggctcgacaaattcttccagtatgatacattatgtgaaagtaagcctcttgctcagggtcccctaaaaggctttctggaagatttaggcagactgcaaaagaagttctatgccaaaaatgaacggttactttgtcctatcaggacctacctggttacagctaggagtgcagccagttcaggcgcccgtgtgctgaagacccttcgacgctggggtctagagatagacgaagctcttttccttgctggagcccccaaaagtcccatcttggtgaagatccggccccacatcttctttgatgaccacatgttccacattgaaggggcacagaggttaggttccatcgcagcttatggctttaataaaaaattcagtagttaggggcagggaggagaaataaagtggtgatagtctggtgttacagaagccacttcttttggctctctaggataattagataggtatttcagaaaattggaccttaaaactttgcttctttggaaaggttttctcctgattttttggaaaaccttttgaaccctcaagttaccatcaaactacttctctttgaactaccaatactgttgaatgccattacacctatctctgtgtaagtcataatgatgactctttaggataagtttagaacttgaatatttgcatgcttaaggcactgttttagaagcttacttagttttataaacactgctcatttttggatgtttgtagataacaatgaattgttacccatcagcattgtagaatagtgtcttcaaaggtagaaggagtatggttaagcacactcttgaaaactggagctttgtattctgtgactgctatggctagctttgtaaccaaagcaaaatgagaatttcactctacctgcatgagtataacaattttgatactgctcatttagaaataaatcatctggttgttcctccagggtactttctaagataagccttaaacagaaacccctaagaaaggttctctgaaaattatttggtgggttaaatgcctctgatccacagagtttcatatttgaagtctccggctttgggcctggcaggctggcacatccatatttgtatggaaaaaaaaaaaaaagaccctacgctaccacttcaaaaagtgacatgaagtgtagtatcctggcccttcattgtcattctctcatgatttttgttttgttttcaacaaaaattggttggtcattaaatatatcatatgttaggcacagtgacctggttattttcacatgttacttcattttcttatcaaattaaatgtttgtgacatagtaaa

SEQ ID NO: 1914 - DNA, 2684 bp, Homo sapiens
gacattctaaatgcaaagctagactgagcaagggaagtgacaggaaatggagctggggagacaaaaatgtggataacaacaaaagaatttcaacaggtaaaaaaatgagtcaaacatctctcaaacagaaaaagaatgagcctggaatgaggtcctcaaaagagagtctagaagcagaaaaaagaaaggaatctgacaaaacaggagttcgtctgagcaatcagggatcacaagaatcatcactgcggaagacagactctcgagggtaccttgtgcgcagtcaatggtctagaatatcccggagcccatccaccaaggctccatccatagatgagcctagaagcaggaacaccagtgctaagctccccagcagctccacgagctcccggactccatccacctccccaagcctgcatgactcctcaccgccgccgctgtccgggcagccctcgctccagccacccgcgtcgccccagctgccccggtcgctggactcgcggcctcccacgcccccagagcccgatcctggctcccggcgcagcaccaaaatgcaagagaatccggaggcctgggcccaaggcatcgtgcgggaaatccgccagacccgggactcgcagccgctggaatattcgcgcacgtcccccaccgagtggaagtcctccagccagcgcagggggatctaccccgcctccacccagctggaccgcaactctctgtccgagcagcagcagcagcagcgggaggacgaggacgactacgaggctgcctactgggcatccatgaggtcgttctacgagaagaacccgagctgctcgcgcccctggccgcccaaacccaagaacgccatcaccattgctctctcatcctgcgcgctcttcaacatggtggacggcaggaaaatctacgagcaagagggtctggaaaagtacatggagtatcagctcaccaatgagaacgtcatcctgaccccgggcccggcgttccgcttcgtcaaggcactacagtatgtcaatgctagactccgtgatctatatcctgatgaacaggacttatttgatattgtactgatgactaataaccatgcccaagtgggagtgcggcttataaacagcgtcaatcactacggcttactgattgaccgcttctgtctgaccgggggaaaagaccccattggctatttgaaggcatatcttaccaacttgtatattgctgcagattctgaaaaagtgcaagaggcaatacaagaaggtattgcctctgcgacaatgtttgatggagccaaagacatggcttactgtgacactcagctccgtgtagcctttgatggggatgctgtcctcttctctgatgagtctgaacattttaccaaggagcatgggctcgacaaattcttccagtatgatacattatgtgaaagtaagcctcttgctcagggtcccctaaaaggctttctggaagatttaggcagactgcaaaagaagttctatgccaaaaatgaacggttactttgtcctatcaggacctacctggttacagctaggagtgcagccagttcaggcgcccgtgtgctgaagacccttcgacgctggggtctagagatagacgaagctcttttccttgctggagcccccaaaagtcccatcttggtgaagatccggccccacatcttctttgatgaccacatgttccacattgaaggggcacagaggttaggttccatcgcagcttatggctttaataaaaaattcagtagttaggggcagggaggagaaataaagtggtgatagtctggtgttacagaagccacttcttttggctctctaggataattagataggtatttcagaaaattggaccttaaaactttgcttctttggaaaggttttctcctgattttttggaaaaccttttgaaccctcaagttaccatcaaactacttctctttgaactaccaatactgttgaatgccattacacctatctctgtgtaagtcataatgatgactctttaggataagtttagaacttgaatatttgcatgcttaaggcactgttttagaagcttacttagttttataaacactgctcatttttggatgtttgtagataacaatgaattgttacccatcagcattgtagaatagtgtcttcaaaggtagaaggagtatggttaagcacactcttgaaaactggagctttgtattctgtgactgctatggctagctttgtaaccaaagcaaaatgagaatttcactctacctgcatgagtataacaattttgatactgctcatttagaaataaatcatctggttgttcctccagggtactttctaagataagccttaaacagaaacccctaagaaaggttctctgaaaattatttggtgggttaaatgcctctgatccacagagtttcatatttgaagtctccggctttgggcctggcaggctggcacatccatatttgtatggaaaaaaaaaaaaaagaccctacgctaccacttcaaaaagtgacatgaagtgtagtatcctggcccttcattgtcattctctcatgatttttgttttgttttcaacaaaaattggttggtcattaaatatatcatatgttaggcacagtgacctggttattttcacatgttacttcattttcttatcaaattaaatgtttgtgacatagtaaa

SEQ ID NO: 1915 - DNA, 2592 bp, Homo sapiens
ggtggacggcgacgctgggtgacccggggtgcaagaattcaggggttgggaaggtgtgagccgcaaacccagcggagggcgggaagaaggaggaggcctctagggtggtcgggggactgggggccccgccggcagaggtccctcggcctcctgactgactgactgcggccgcctccggccaggacgctgggagctgcctgcgggaaggtgcggggagcggagccatggcctccggtgcgtataacccgtatatagagataattgaacaacccaggcagaggggaatgcgttttagatacaaatgtgaagggcgatcagcaggcagcattccaggggagcacagcacagacaacaaccgaacatacccttctatccagattatgaactattatggaaaaggaaaagtgagaattacattagtaacaaagaatgacccatataaacctcatcctcatgatttagttggaaaagactgcagagacggctactatgaagcagaatttggacaagaacgcagacctttgtttttccaaaatttgggtattcgatgtgtgaagaaaaaagaagtaaaagaagctattattacaagaataaaggcaggaatcaatccattcaatgtccctgaaaaacagctgaatgatattgaagattgtgacctcaatgtggtgagactgtgttttcaagtttttctccctgatgaacatggtaatttgacgactgctcttcctcctgttgtctcgaacccaatttatgacaaccgtgctccaaatactgcagaattaaggatttgtcgtgtaaacaagaattgtggaagtgtcagaggaggagatgaaatatttctactttgtgacaaagttcagaaagatgacatagaagttcgttttgtgttgaacgattgggaagcaaaaggcatcttttcacaagctgatgtacaccgtcaagtagccattgttttcaaaactccaccatattgcaaagctatcacagaacccgtaacagtaaaaatgcagttgcggagaccttctgaccaggaagttagtgaatctatggattttagatatctgccagatgaaaaagatacttacggcaataaagcaaagaaacaaaagacaactctgcttttccagaaactgtgccaggatcacgtagaaacagggtttcgccatgttgaccaggatggtcttgaactcctgacatcaggtgatccacccaccttggcctcccaaagtgctgggattacagttaattttcctgagagaccaagacctggtctcctcggttcaattggagaaggaagatacttcaaaaaagaaccaaacttgttttctcatgatgcagttgtgagagaaatgcctacaggggtttcaagtcaagcagaatcctactatccctcacctgggcccatctcaagtggattgtcacatcatgcctcaatggcacctctgccttcttcaagctggtcatcagtggcccaccccaccccacgctcaggcaatacaaacccactgagtagtttttcaacaaggacacttccttctaattcgcaaggtatcccaccattcctgagaatacctgttgggaatgatttaaatgcttctaatgcttgcatttacaacaatgccgatgacatagtcggaatggaagcgtcatccatgccatcagcagatttatatggtatttctgatcccaacatgctgtctaattgttctgtgaatatgatgacaaccagcagtgacagcatgggagagactgataatccaagacttctgagcatgaatcttgaaaacccctcatgtaattcagtgttagacccaagagacttgagacagctccatcagatgtcctcttccagtatgtcagcaggcgccaattccaatactactgtttttgtttcacaatcagatgcatttgagggatctgacttcagttgtgcagataacagcatgataaatgagtcgggaccatcaaacagtactaatccaaacagtcatggttttgttcaagatagtcagtattcaggtattggcagtatgcaaaatgagcaattgagtgactcctttccatatgaattttttcaagtataacttgcaagatttaaatccttttaaatcttgataccacctatatagatgcagcattttgtatttgtctaactggggatataatactatatttatactgtatatataatactgactgagaatataatactgtatttgagaatataaaaaacttttttcagggaagaagcatacaactttggacatagcgaatacaaaattggaagctgtcataaaaagacaactcagaggccaggcgcaggggctcacacctgtaatcctagcactttgggaggccaaggcgggtggatcacttgagaccaggaattcgagaccagcctggccaacatggtgaaaccccgtctctactaaaaatacaaaaattagctgagcatggtggtacgtgcctgtactgtcagctacttgggaggctgaggcacaataattgtttgaacccaggaagcagaggttgcagtgagctgagatcacaccaccgcactccagcctgggtgacagagtgagactctgtctc

SEQ ID NO: 1916 - DNA, 2179 bp, Homo sapiens
cagaccgtgcctcccggccgcccggccggcccgcgtgcatgcttcggtctgggccagcctctgggccgtccgtccccactggccgggccatgccgagtcgccgcgtcgccagaccgccggctgcgccggagctgggggccttagggtcccccgacctctcctcactctcgctcgccgtttccaggagcacagatgaattggagatcatcgacgagtacatcaaggagaacggcttcggcctggacgggggacagccgggcccgggcgaggggctgccacgcctggtgtctcgcggggctgcgtccctgagcacggtcaccctgggccctgtggcgcccccagccacgccgccgccttggggctgccccctgggccgactagtgtccccagcgccgggcccgggcccgcagccgcacctggtcatcacggagcagcccaagcagcgcggcatgcgcttccgctacgagtgcgagggccgctcggccggcagcatccttggggagagcagcaccgaggccagcaagacgctgcccgccatcgagctccgggattgtggagggctgcgggaggtggaggtgactgcctgcctggtgtggaaggactggcctcaccgagtccacccccacagcctcgtggggaaagactgcaccgacggcatctgcagggtgcggctccggcctcacgtcagcccccggcacagttttaacaacctgggcatccagtgtgtgaggaagaaggagattgaggctgccattgagcggaagattcaactgggcattgacccctacaacgctgggtccctgaagaaccatcaggaagtagacatgaatgtggtgaggatctgcttccaggcctcatatcgggaccagcagggacagatgcgccggatggatcctgtgctttccgagcccgtctatgacaagaaatccacaaacacatcagagctgcggatttgccgaattaacaaggaaagcgggccgtgcaccggtggcgaggagctctacttgctctgcgacaaggtgcagaaagaggacatatcagtggtgttcagcagggcctcctgggaaggtcgggctgacttctcccaggccgacgtgcaccgccagattgccattgtgttcaagacgccgccctacgaggacctggagattgtcgagcccgtgacagtcaacgtcttcctgcagcggctcaccgatggggtccgcagcgagccattgcctttcacgtacctgcctcgcgaccatgacagctacggcgtggacaagaagcggaaacgggggatgcccgacgtccttggggagctgaacagctctgacccccatggcatcgagagcaaacggcggaagaaaaagccggccatcctggaccacttcctgcccaaccacggctcaggcccgttcctcccgccgtcagccctgctgccagaccctgacttcttctctggcaccgtgtccctgcccggcctggagccccctggcgggcctgacctcctggacgatggctttgcctacgaccctacggcccccacactcttcaccatgctggacctgctgcccccggcaccgccacacgctagcgctgttgtgtgcagcggaggtgccggggccgtggttggggagacccccggccctgaaccactgacactggactcgtaccaggccccgggccccggggatggaggcaccgccagccttgtgggcagcaacatgttccccaatcattaccgcgaggcggcctttgggggcggcctcctatccccggggcctgaagccacgtagccccgcgatgccagaggaggggcactgggtggggagggaggtggaggagccgtgcaatcccaaccaggatgtctagcacccccatccccttggcccttcctcatgcttctgaagtggacatattcagccttggcgagaagctccgttgcacgggtttccccttgagcccattttacagatgaggaaactgagtccggagaggaaaagggacatggctcccgtgcactagcttgttacagctgcctctgtccccacatgtgggggcaccttctccagtaggattcggaaaagattgtacatatgggaggagggggcagattcctggccctccctccccagacttgaaggtggggggtaggttggttgttcagagtcttcccaataaagatgagtttttgagc

SEQ ID NO: 1917 - DNA, 5629 bp, Homo sapiens
agtcccgcgaccgaagcagggcgcgcagcagcgctgagtgccccggaacgtgcgtcgcgcccccagtgtccgtcgcgtccgccgcgccccgggcggggatggggcggccagactgagcgccgcacccgccatccagacccgccggccctagccgcagtccctccagccgtggccccagcgcgcacgggcgatggcgaaggcgacgtccggtgccgcggggctgcgtctgctgttgctgctgctgctgccgctgctaggcaaagtggcattgggcctctacttctcgagggatgcttactgggagaagctgtatgtggaccaggcggccggcacgcccttgctgtacgtccatgccctgcgggacgcccctgaggaggtgcccagcttccgcctgggccagcatctctacggcacgtaccgcacacggctgcatgagaacaactggatctgcatccaggaggacaccggcctcctctaccttaaccggagcctggaccatagctcctgggagaagctcagtgtccgcaaccgcggctttcccctgctcaccgtctacctcaaggtcttcctgtcacccacatcccttcgtgagggcgagtgccagtggccaggctgtgcccgcgtatacttctccttcttcaacacctcctttccagcctgcagctccctcaagccccgggagctctgcttcccagagacaaggccctccttccgcattcgggagaaccgacccccaggcaccttccaccagttccgcctgctgcctgtgcagttcttgtgccccaacatcagcgtggcctacaggctcctggagggtgagggtctgcccttccgctgcgccccggacagcctggaggtgagcacgcgctgggccctggaccgcgagcagcgggagaagtacgagctggtggccgtgtgcaccgtgcacgccggcgcgcgcgaggaggtggtgatggtgcccttcccggtgaccgtgtacgacgaggacgactcggcgcccaccttccccgcgggcgtcgacaccgccagcgccgtggtggagttcaagcggaaggaggacaccgtggtggccacgctgcgtgtcttcgatgcagacgtggtacctgcatcaggggagctggtgaggcggtacacaagcacgctgctccccggggacacctgggcccagcagaccttccgggtggaacactggcccaacgagacctcggtccaggccaacggcagcttcgtgcgggcgaccgtacatgactataggctggttctcaaccggaacctctccatctcggagaaccgcaccatgcagctggcggtgctggtcaatgactcagacttccagggcccaggagcgggcgtcctcttgctccacttcaacgtgtcggtgctgccggtcagcctgcacctgcccagtacctactccctctccgtgagcaggagggctcgccgatttgcccagatcgggaaagtctgtgtggaaaactgccaggcattcagtggcatcaacgtccagtacaagctgcattcctctggtgccaactgcagcacgctaggggtggtcacctcagccgaggacacctcggggatcctgtttgtgaatgacaccaaggccctgcggcggcccaagtgtgccgaacttcactacatggtggtggccaccgaccagcagacctctaggcaggcccaggcccagctgcttgtaacagtggaggggtcatatgtggccgaggaggcgggctgccccctgtcctgtgcagtcagcaagagacggctggagtgtgaggagtgtggcggcctgggctccccaacaggcaggtgtgagtggaggcaaggagatggcaaagggatcaccaggaacttctccacctgctctcccagcaccaagacctgccccgacggccactgcgatgttgtggagacccaagacatcaacatttgccctcaggactgcctccggggcagcattgttgggggacacgagcctggggagccccgggggattaaagctggctatggcacctgcaactgcttccctgaggaggagaagtgcttctgcgagcccgaagacatccaggatccactgtgcgacgagctgtgccgcacggtgatcgcagccgctgtcctcttctccttcatcgtctcggtgctgctgtctgccttctgcatccactgctaccacaagtttgcccacaagccacccatctcctcagctgagatgaccttccggaggcccgcccaggccttcccggtcagctactcctcttccggtgcccgccggccctcgctggactccatggagaaccaggtctccgtggatgccttcaagatcctggaggatccaaagtgggaattccctcggaagaacttggttcttggaaaaactctaggagaaggcgaatttggaaaagtggtcaaggcaacggccttccatctgaaaggcagagcagggtacaccacggtggccgtgaagatgctgaaagagaacgcctccccgagtgagcttcgagacctgctgtcagagttcaacgtcctgaagcaggtcaaccacccacatgtcatcaaattgtatggggcctgcagccaggatggcccgctcctcctcatcgtggagtacgccaaatacggctccctgcggggcttcctccgcgagagccgcaaagtggggcctggctacctgggcagtggaggcagccgcaactccagctccctggaccacccggatgagcgggccctcaccatgggcgacctcatctcatttgcctggcagatctcacaggggatgcagtatctggccgagatgaagctcgttcatcgggacttggcagccagaaacatcctggtagctgaggggcggaagatgaagatttcggatttcggcttgtcccgagatgtttatgaagaggattcctacgtgaagaggagccagggtcggattccagttaaatggatggcaattgaatccctttttgatcatatctacaccacgcaaagtgatgtatggtcttttggtgtcctgctgtgggagatcgtgaccctagggggaaacccctatcctgggattcctcctgagcggctcttcaaccttctgaagaccggccaccggatggagaggccagacaactgcagcgaggagatgtaccgcctgatgctgcaatgctggaagcaggagccggacaaaaggccggtgtttgcggacatcagcaaagacctggagaagatgatggttaagaggagagactacttggaccttgcggcgtccactccatctgactccctgatttatgacgacggcctctcagaggaggagacaccgctggtggactgtaataatgcccccctccctcgagccctcccttccacatggattgaaaacaaactctatggcatgtcagacccgaactggcctggagagagtcctgtaccactcacgagagctgatggcactaacactgggtttccaagatatccaaatgatagtgtatatgctaactggatgctttcaccctcagcggcaaaattaatggacacgtttgatagttaacatttctttgtgaaaggtaatggactcacaaggggaagaaacatgctgagaatggaaagtctaccggccctttctttgtgaacgtcacattggccgagccgtgttcagttcccaggtggcagactcgtttttggtagtttgttttaacttccaaggtggttttacttctgatagccggtgattttccctcctagcagacatgccacaccgggtaagagctctgagtcttagtggttaagcattcctttctcttcagtgcccagcagcacccagtgttggtctgtgtccatcagtgaccaccaacattctgtgttcacatgtgtgggtccaacacttactacctggtgtatgaaattggacctgaactgttggatttttctagttgccgccaaacaaggcaaaaaaatttaaacatgaagcacacacacaaaaaaggcagtaggaaaaatgctggccctgatgacctgtccttattcagaatgagagactgcggggggggcctgggggtagtgtcaatgcccctccagggctggaggggaagaggggccccgaggatgggcctgggctcagcattcgagatcttgagaatgatttttttttaatcatgcaacctttccttaggaagacatttggttttcatcatgattaagatgattcctagatttagcacaatggagagattccatgccatctttactatgtggatggtggtatcagggaagagggctcacaagacacatttgtcccccgggcccaccacatcatcctcacgtgttcggtactgagcagccactacccctgatgagaacagtatgaagaaagggggctgttggagtcccagaattgctgacagcagaggctttgctgctgtgaatcccacctgccaccagcctgcagcacaccccacagccaagtagaggcgaaagcagtggctcatcctacctgttaggagcaggtagggcttgtactcactttaatttgaatcttatcaacttactcataaagggacaggctagctagctgtgttagaagtagcaatgacaatgaccaaggactgctacacctctgattacaattctgatgtgaaaaagatggtgtttggctcttatagagcctgtgtgaaaggcccatggatcagctcttcctgtgtttgtaatttaatgctgctacaagatgtttctgtttcttagattctgaccatgactcataagcttcttgtcattcttcattgcttgtttgtggtcacagatgcacaacactcctccagtcttgtgggggcagcttttgggaagtctcagcagctcttctggctgtgttgtcagcactgtaacttcgcagaaaagagtcggattaccaaaacactgcctgctcttcagacttaaagcactgataggacttaaaatagtctcattcaaatactgtattttatataggcatttcacaaaaacagcaaaattgtggcattttgtgaggccaaggcttggatgcgtgtgtaatagagccttgtggtgtgtgcgcacacacccagagggagagtttgaaaaatgcttattggacacgtaacctggctctaatttgggctgtttttcagatacactgtgataagttcttttacaaatatctatagacatggtaaacttttggttttcagatatgcttaatgatagtcttactaaatgcagaaataagaataaactttctcaaattattaaaaatgcctacacagtaagtgtgaattgctgcaacaggtttgttctcaggagggtaagaactccaggtctaaacagctgacccagtgatggggaatttatccttgaccaatttatccttgaccaataacctaattgtctattcctgagttataaaagtccccatccttattagctctactggaattttcatacacgtaaatgcagaagttactaagtattaagtattactgagtattaagtagtaatctgtcagttattaaaatttgtaaaatctatttatgaaaggtcattaaaccagatcatgttcctttttttgtaatcaaggtgactaagaaaatcagttgtgtaaataaaatcatgtatcataaaaaaaaaaaaaaaa

SEQ ID NO: 1918 - DNA, 4174 bp, Homo sapiens
agtcccgcgaccgaagcagggcgcgcagcagcgctgagtgccccggaacgtgcgtcgcgcccccagtgtccgtcgcgtccgccgcgccccgggcggggatggggcggccagactgagcgccgcacccgccatccagacccgccggccctagccgcagtccctccagccgtggccccagcgcgcacgggcgatggcgaaggcgacgtccggtgccgcggggctgcgtctgctgttgctgctgctgctgccgctgctaggcaaagtggcattgggcctctacttctcgagggatgcttactgggagaagctgtatgtggaccaggcggccggcacgcccttgctgtacgtccatgccctgcgggacgcccctgaggaggtgcccagcttccgcctgggccagcatctctacggcacgtaccgcacacggctgcatgagaacaactggatctgcatccaggaggacaccggcctcctctaccttaaccggagcctggaccatagctcctgggagaagctcagtgtccgcaaccgcggctttcccctgctcaccgtctacctcaaggtcttcctgtcacccacatcccttcgtgagggcgagtgccagtggccaggctgtgcccgcgtatacttctccttcttcaacacctcctttccagcctgcagctccctcaagccccgggagctctgcttcccagagacaaggccctccttccgcattcgggagaaccgacccccaggcaccttccaccagttccgcctgctgcctgtgcagttcttgtgccccaacatcagcgtggcctacaggctcctggagggtgagggtctgcccttccgctgcgccccggacagcctggaggtgagcacgcgctgggccctggaccgcgagcagcgggagaagtacgagctggtggccgtgtgcaccgtgcacgccggcgcgcgcgaggaggtggtgatggtgcccttcccggtgaccgtgtacgacgaggacgactcggcgcccaccttccccgcgggcgtcgacaccgccagcgccgtggtggagttcaagcggaaggaggacaccgtggtggccacgctgcgtgtcttcgatgcagacgtggtacctgcatcaggggagctggtgaggcggtacacaagcacgctgctccccggggacacctgggcccagcagaccttccgggtggaacactggcccaacgagacctcggtccaggccaacggcagcttcgtgcgggcgaccgtacatgactataggctggttctcaaccggaacctctccatctcggagaaccgcaccatgcagctggcggtgctggtcaatgactcagacttccagggcccaggagcgggcgtcctcttgctccacttcaacgtgtcggtgctgccggtcagcctgcacctgcccagtacctactccctctccgtgagcaggagggctcgccgatttgcccagatcgggaaagtctgtgtggaaaactgccaggcattcagtggcatcaacgtccagtacaagctgcattcctctggtgccaactgcagcacgctaggggtggtcacctcagccgaggacacctcggggatcctgtttgtgaatgacaccaaggccctgcggcggcccaagtgtgccgaacttcactacatggtggtggccaccgaccagcagacctctaggcaggcccaggcccagctgcttgtaacagtggaggggtcatatgtggccgaggaggcgggctgccccctgtcctgtgcagtcagcaagagacggctggagtgtgaggagtgtggcggcctgggctccccaacaggcaggtgtgagtggaggcaaggagatggcaaagggatcaccaggaacttctccacctgctctcccagcaccaagacctgccccgacggccactgcgatgttgtggagacccaagacatcaacatttgccctcaggactgcctccggggcagcattgttgggggacacgagcctggggagccccgggggattaaagctggctatggcacctgcaactgcttccctgaggaggagaagtgcttctgcgagcccgaagacatccaggatccactgtgcgacgagctgtgccgcacggtgatcgcagccgctgtcctcttctccttcatcgtctcggtgctgctgtctgccttctgcatccactgctaccacaagtttgcccacaagccacccatctcctcagctgagatgaccttccggaggcccgcccaggccttcccggtcagctactcctcttccggtgcccgccggccctcgctggactccatggagaaccaggtctccgtggatgccttcaagatcctggaggatccaaagtgggaattccctcggaagaacttggttcttggaaaaactctaggagaaggcgaatttggaaaagtggtcaaggcaacggccttccatctgaaaggcagagcagggtacaccacggtggccgtgaagatgctgaaagagaacgcctccccgagtgagcttcgagacctgctgtcagagttcaacgtcctgaagcaggtcaaccacccacatgtcatcaaattgtatggggcctgcagccaggatggcccgctcctcctcatcgtggagtacgccaaatacggctccctgcggggcttcctccgcgagagccgcaaagtggggcctggctacctgggcagtggaggcagccgcaactccagctccctggaccacccggatgagcgggccctcaccatgggcgacctcatctcatttgcctggcagatctcacaggggatgcagtatctggccgagatgaagctcgttcatcgggacttggcagccagaaacatcctggtagctgaggggcggaagatgaagatttcggatttcggcttgtcccgagatgtttatgaagaggattcctacgtgaagaggagccagggtcggattccagttaaatggatggcaattgaatccctttttgatcatatctacaccacgcaaagtgatgtatggtcttttggtgtcctgctgtgggagatcgtgaccctagggggaaacccctatcctgggattcctcctgagcggctcttcaaccttctgaagaccggccaccggatggagaggccagacaactgcagcgaggagatgtaccgcctgatgctgcaatgctggaagcaggagccggacaaaaggccggtgtttgcggacatcagcaaagacctggagaagatgatggttaagaggagagactacttggaccttgcggcgtccactccatctgactccctgatttatgacgacggcctctcagaggaggagacaccgctggtggactgtaataatgcccccctccctcgagccctcccttccacatggattgaaaacaaactctatggtagaatttcccatgcatttactagattctagcaccgctgtcccctctgcactatccttcctctctgtgatgctttttaaaaatgtttctggtctgaacaaaaccaaagtctgctctgaacctttttatttgtaaatgtctgactttgcatccagtttacatttaggcattattgcaactatgtttttctaaaaggaagtgaaaataagtgtaattaccacattgcccagcaacttaggatggtagaggaaaaaacagatcagggcggaactctcaggggagaccaagaacaggttgaataaggcgcttctggggtgggaatcaagtcatagtacttctactttaactaagtggataaatatacaaatctggggaggtattcagttgagaaaggagccaccagcaccactcagcctgcactgggagcacagccaggttcccccagacccctcctgggcaggcaggtgcctctcagaggccacccggcactggcgagcagccactggccaagcctcagccccagtcccagccacatgtcctccatcaggggtagcgaggttgcaggagctggctggccctgggaggacgcacccccactgctgttttcacatcctttcccttacccaccttcaggacggttgtcacttatgaagtcagtgctaaagctggagcagttgctttttgaaagaacatggtctgtggtgctgtggtcttacaatggacagtaaatatggttcttgccaaaactccttcttttgtctttgattaaatactagaaatttaaaaaaaaaaaaaaa

SEQ ID NO: 1919 - DNA, 1715 bp, Homo sapiens
ggtggcgggaagaggaggcgcgagaatggaggtggaggccgtctgtggtggcgcgggcgaggtggaggcccaggactctgaccctgcccctgccttcagcaaggcccccggcagcgccggccactacgaactgccgtgggttgaaaaatataggccagtaaagctgaatgaaattgtcgggaatgaagacaccgtgagcaggctagaggtctttgcaagggaaggaaatgtgcccaacatcatcattgcgggccctccaggaaccggcaagaccacaagcattctgtgcttggcccgggccctgctgggcccagcactcaaagatgccatgttggaactcaatgcttcaaatgacaggggcattgacgttgtgaggaataaaattaaaatgtttgctcaacaaaaagtcactcttcccaaaggccgacataagatcatcattctggatgaagcagacagcatgaccgacggagcccagcaagccttgaggagaaccatggaaatctactctaaaaccactcgcttcgcccttgcttgtaatgcttcggataagatcatcgagcccattcagtcccgctgtgcagtcctccggtacacaaagctgaccgacgcccagatcctcaccaggctgatgaatgttatcgagaaggagagggtaccctacactgatgacggcctagaagccatcatcttcacggcccagggagacatgaggcaggcgctgaacaacctgcagtccaccttctcaggatttggcttcattaacagtgagaacgtgttcaaggtctgtgacgagccccacccactgctggtaaaggagatgatccagcactgtgtgaatgccaacattgacgaagcctacaagattcttgctcacttgtggcatctgggctactcaccagaagatatcattggcaacatctttcgagtgtgtaaaactttccaaatggcagaatacctgaaactggagtttatcaaggaaattggatacactcacatgaaaatagcggaaggagtgaactctcttttgcagatggcaggcctcctggcaaggctgtgtcagaagacaatggccccggtggccagttagagcagagacttcactgactgacttacaggtgccctattctgaggtacaggagccgcggctttctgatgggggaaaatgccgccttaggctggagccaacatgactgtcctttaaactccagtggctggccaggcacggtagctcacgcctgtaatcccaacactttgggaggccgaggcaggtggatcacctgaggtcagaagttcaagaccagcctggccaacatggggaaaccctgtctttactaaaaatataaaaattagctgggtgtggtggcgggcacctgtaatcccagctactcgggaggctgtggcaggagaatcgcttgaacccaggaggtggaggttgcagtgagccaagatcacaccattgcactccagcctgggcgacagagtctccatctggggaaaaaaattaaataaataaactcccgtgacttgcatgtttgcttctgggacgtctgtgccccgcaagtgtttgagtttggcctccaccccattgatgcggtgacggggcggaaaggcgcagagaagctgagggcggtctctgatctgtgtgtgggttgacattttagctaataaagccttgcagtgtttgttggcaaaaaaaaaaaaaaaaaaaaaaa

SEQ ID NO: 1920 - DNA, 1613 bp, Homo sapiens
ggtggcgggaagaggaggcgcgagaatggaggtggaggccgtctgtggtggcgcgggcgaggtggaggcccaggactctgaccctgcccctgccttcagcaaggcccccggcagcgccggccactacgaactgccgtgggttgaaaaatataggccagtaaagctgaatgaaattgtcgggaatgaagacaccgtgagcaggctagaggtctttgcaagggaaggaaatgtgcccaacatcatcattgcgggccctccaggaaccggcaagaccacaagcattctgtgcttggcccgggccctgctgggcccagcactcaaagatgccatgttggaactcaatgcttcaaatgacagcatgaccgacggagcccagcaagccttgaggagaaccatggaaatctactctaaaaccactcgcttcgcccttgcttgtaatgcttcggataagatcatcgagcccattcagtcccgctgtgcagtcctccggtacacaaagctgaccgacgcccagatcctcaccaggctgatgaatgttatcgagaaggagagggtaccctacactgatgacggcctagaagccatcatcttcacggcccagggagacatgaggcaggcgctgaacaacctgcagtccaccttctcaggatttggcttcattaacagtgagaacgtgttcaaggtctgtgacgagccccacccactgctggtaaaggagatgatccagcactgtgtgaatgccaacattgacgaagcctacaagattcttgctcacttgtggcatctgggctactcaccagaagatatcattggcaacatctttcgagtgtgtaaaactttccaaatggcagaatacctgaaactggagtttatcaaggaaattggatacactcacatgaaaatagcggaaggagtgaactctcttttgcagatggcaggcctcctggcaaggctgtgtcagaagacaatggccccggtggccagttagagcagagacttcactgactgacttacaggtgccctattctgaggtacaggagccgcggctttctgatgggggaaaatgccgccttaggctggagccaacatgactgtcctttaaactccagtggctggccaggcacggtagctcacgcctgtaatcccaacactttgggaggccgaggcaggtggatcacctgaggtcagaagttcaagaccagcctggccaacatggggaaaccctgtctttactaaaaatataaaaattagctgggtgtggtggcgggcacctgtaatcccagctactcgggaggctgtggcaggagaatcgcttgaacccaggaggtggaggttgcagtgagccaagatcacaccattgcactccagcctgggcgacagagtctccatctggggaaaaaaattaaataaataaactcccgtgacttgcatgtttgcttctgggacgtctgtgccccgcaagtgtttgagtttggcctccaccccattgatgcggtgacggggcggaaaggcgcagagaagctgagggcggtctctgatctgtgtgtgggttgacattttagctaataaagccttgcagtgtttgttggcaaaaaaaaaaaaaaaaaaaaaaa

SEQ ID NO: 1921 - DNA, 4143 bp, Homo sapiens
ttcctggggccgcccgtgaggatgtcgcgaccgcccccgggtgcccctcagccccagagacgccgccgcggcggagtccgcagcctccctgcctgaggcgtccgcggccgggatccggcccctcccctcgcctcctctcctaggtgccggccgggagggcggccgcagcagattttatcatgtgggcaacctgctgcaactggttctgcctggatggacagcctgaggaggtcccaccaccccagggagccaggatgcaggcctattccaaccctgggtacagctccttcccttccccaacaggcttggaaccaagctgcaagtcctgtggggctcactttgcaaacacggccaggaagcagacctgcttggactgtaagaaaaatttttgcatgacctgttcgagccaagtagggaatgggccccgcctctgccttctctgccaacggtttcgagctacagcctttcagcgagaggagctcatgaagatgaaggtgaaggacttgagggactatctcagcctccatgacatctctaccgaaatgtgccgggagaaagaagagctggtgctcttggtccttggccagcagcctgtaatctcccaggaggacaggactcgtgcctccaccttgtccccagactttcctgagcagcaggccttcctgacccagcctcactccagcatggttccacctacctcacccaacctcccctcttcatctgcacaagccacctctgttcccccagcccaggttcaggagaatcagcaggccaatggccatgtgtctcaggatcaagaggaacccgtctacctggagagcgtggccagagtacctgctgaggatgagacccagtctattgactcagaggacagctttgtcccaggccgaagggcctctctgtctgacctgactgacctggaggacattgaaggcctgacagtgcggcagctgaaagagatcttggctcgcaactttgtcaactacaagggctgctgtgagaagtgggagctgatggagagagtgacccggctatacaaggatcagaaaggactccagcacctggtcagtggtgccgaagaccaaaacgggggagcagtaccatcaggcttggaggagaacctgtgtaagatctgcatggactcacccattgactgtgttcttctggagtgtggccacatggtaacctgtaccaagtgtggcaagcgcatgaatgaatgtcccatctgccggcagtatgtaatccgagctgtgcatgtcttccggtcctgagagcttgcatcggtttcttcagtgccttacagggaaatagcctggggtgtctgggctcagggttggccagcttgcagaggagcaagctagtagaaatattgcagggttcccaaaaccaggtcaagcaagatgccatgtcacccctgagcatgcctgtcttcccaggggtgtacctcttggctggcaaagcccaaggccagtgggaacttgtataaatcacatgggtatgttcttggttcagtgatcttggagtgatgatggtaactgatgaacagagaactttccagaacttgggtcctgtcttcctccctgaacctagacagtttcacccctcctcctgtacccaacccatccccaccccatatgggagatgcttgcccatgtgtttcatcaatcagaagtcctcctccccagcacattcggatttaaatttctggtctctccggctttctgtgctttaactatctttgctaaagtctcttgctacattgcctaaatccatttgtttctttggaccaaaaatgttagtttaccagaccgatagtggtccttaggacagattttagaccagtaaacttatctttggtgagaaatgaaatacaaatgctatagaaaaatttcaaagttgttaaaagccacttcattaaatgctgggattggaagctgttggtctcctgacctgactctgggagccaacaaaacatcaggctcccaaactgctgggaaatttgtttctgtctgcaagggatagtgcgtgcataatccctgctgctgcttctcttgggacctgatttgcaccatccttagtttatgcggaaaggggaagcaatgggtggaggcagtggccttctccttaattttggcttggcttctgatccttttcccaactagaagtcttaagccacttttcgctgaaaatgaaatccctcccttatccatggtagttttaaatttggtttcattgaagaaatagatttaggcaaagagcctgtgctcttctctggccagactgctgttgaagttcctggagagcaaatgttaagacagagcacttaagagctttcaggaggtactgaatgagactggattctgttgtaagccgacagttcaagtctttatttcccaggttggtggggagtgaggagaccctactttcattccctttcctagcccactgatttttgggggcaggtcagggagaaagcattttttttttttttttgagtctcactctgttgcccaggctggagtgcagtggtacagtcttggcttactgcaacctccacctcccaggttcaagctattctcctgccttagcctccagagtagctgggattataggcgcccaccaccacaccaggctaatttttgtatttttagtagagacggggttttaccatgttcaccaggctggtcttgaactcttgaccttatgatccgcccgcctcagcttcccaaagtgctgggattacaggcgtgagccaccacacccagcaggagaaaccattttctaggctctttaggaaggaccatgcaatgagtaggtgatgtatttgagccctcacagtctttacacccctagaggagctggaggacttaagagtttgctgcagaagcgtggccaagcacaaaacacatgatcaggaaagcagagtgttttcccattaccaatggatgaactatgcaaaccctaaacgccttggcagacacctcccaccccttacccctcccatgcagctgaaaaatctgagactagaaccaatcatgactctggatggcagagggaaacctctaaagggacttattacattggtacagacatatttatgctttcttccatcaccaaccactaaacccctttggaggaatgaaataactgcataaactagtcaactgaacactgggccacttacctcaatgttatacaaagtcctggatgatttgattctgaaccacagcctttgcaggagttgggggaatcagatttgctcatgaagacatccctttccacttttgtcatgggcagtaaatactatagtttacaatgcctaccaattagcaaaggatcattcattcagctactcagttcctctgtaaaacaggtctatgtatgtgcaattcagctaagatctagcagtaacttaagggcagaagctggctctctacttacaacctgctttctctgctgaagccttacctcctcttcagtttccctcctagacacaaatcgaaaataatatactgatagctggttagtaacctcagtaagaattaaaactgaggttgtttactcattttgcctttaaatcttttatccccttttggtgaaggtttccctttaggaaaaaaggtgtcaaacaaccctgattttttttttttttgcatcatttttattacaccaaattaaagttgggagttccaagatcccattccagttaatatttaaccaaggtctaaaatttgattttttttaaatctttgaatcctcccttctgcccctcatggatccttggttttaatgatatggaaacatctaattcttagaattattccgtagcttttgctgattactctgagatttcagttaagacttgtttcaaaagacagatagctgactggttcataatacattggaatagttggatccaaactaataagaataagctgtacaggaactagtgctcaatatacattgtataaatttgtggaaatctcttggatgtgaattgttacttcaagtggcttttattaagattttctcagacttacttggaggttaaagcaaacccaaatgtgtattattttgttacagagctctgctttataattttgtaataaagtttcaatacagacaccaaaaaaaaaaaaaaaa

SEQ ID NO: 1922 - DNA, 2825 bp, Homo sapiens
cgcgcaggctgcggtcgcgcaggcgcagtcggggcgccttcccggtataggcgccttttaccccagcgtgtcctgagtctttggttcgcgaagtgccgttaggccaagcaggtgctaaaagcccggggtcgtggaccccggccaggtcttagcagcatggaggcgcagggtgtagcggagggcgcggggccgggcgccgccagcggcgtgccccaccccgcggccctagccccggctgcggctcccaccttggcgccagcctcggtggcggccgcggcctctcaattcaccctgctagtgatgcaaccctgtgctgggcaggacgaggctgcggcccccgggggcagcgttggggcgggcaagcccgttaggtacctgtgcgaaggggccggggatggcgaagaggaggctggggaggacgaggcggacctgttagacacttcggaccctccggggggaggcgagagcgcggctagtttggaggatctagaggacgaggagactcactcggggggcgagggcagcagcgggggcgcccggaggcggggcagcggtgggggcagcatgagcaagacctgcacctacgaaggctgcagcgagaccacgagccaggtggccaagcagcgcaaaccgtggatgtgcaagaaacaccgcaacaagatgtacaaggacaagtataaaaagaagaagagcgaccaggccctgaactgcggtgggactgcctcgactggcagcgcgggaaacgtcaaactcgaggaaagtgcagataacatactctccattgttaaacaaagaacaggatcttttggggatcgtcctgcaagacctactcttttagaacaagtgttaaatcaaaaaagactgtcgttactaagaagtccagaagtagtgcaatttttacagaaacagcaacagctattaaatcagcaagttttggagcaaagacaacagcagtttccaggaacatcaatgtgagggaacttaccaagaacatctacatggtttttatcttattgtaatagatgagcatatttttttaccagacataaatggggtaataatctatgcctgtagaacataaacattttcctgtaaatgtatgtgtgcatttggggataagtaagtattgcactttgtgcatctaatctttcagattactgtgagtttgaagaagtcagcttatctttccaaataacatttaattataatgttttttaaaaaatatattcctcttcagtcattgttactgaaggtaatgaagcagttactttctgtggaagtcataaagttaatagatattaatcttgactcatctagctcagtggttctcatcaagggtcaatttgattgtcatagtgaccttgaaaaccactggcttttagtgagtggccaggaaatgctaaatgttctgcagtgtcaggggtagtcccacatactaaagattgtctcacccgcagtgccaataacactcctaagaaatgttgatggctattttgtggtgctaacatgtagttggggcacctacaattgggttctcttaataacctttctttgcagttaagactgaagctgtcaaagaggtaagcacattttatatagacgtaaggaaagtgattattgtttaatatctgtgaatttaggatgtgcatctcttttcagaggtgtgttagtaaaacctgacggattaactaagcacactgggatgtgtctcctacagttggcttctctctttgatgttacctgttagtgctgatctcttaaagcagacatttcttgtttgttgaatttgtgaacagtatagatctcagcccaccaatgccaagacaaaattatttttcttatacttattttttattaaacaaaatgaaaaagatccttttcaaaaaggtgatcctgaaaataaaactaacactccagtattttgtcattgtttttcgcaattgagctatctgaaaactgttattcctaagtaatgttcaaaaatgataagtaatctggatacctttttcttatactttctcctaggaaaactttaaaactttaaaaaggcaaacctaccaataggaataacaaattaaatgtcaagagagtatatccaatattaggatataaatgtatgtgtctcaagtttaactctacaaaaatttgttacttgttttttaaactctatatataaagttcgacttaatcatggctgttctaagaagtacttatggagagcaagaacatttttgttcatttcttaatgtgtgtgtttttacttgcatatctgttcaaaacacttttaacaaaattaattcattaaagtccagttgttgacctttgagttagctgatttctttattctgttctttagtttattcttactagatgcagaggaattcatctactgtctgttattaactgttagtttattctcatacttacgatgttgagagtttttttgaagcttaagttaccctttatggtggaaaacattagcttatgcttctttagatggaataatgggaaaggagggaaatgggaaatggatggaaatgggaaaggagggaaaataatagcccagtgagagctgaatgaaaagggactgaatttaaatatttgtaagaactttgtgatgatgagtaattgtcagacgtgggatagataactgagaggctcagaatctttaccaaggatattttttaggataaggtagctgcctgttcatgaatttggataagaatagtaggacaatattcaacacaatttaatttttgtctgccacattagacatttttttaccttataaaatgatcaataaagcaataaggtttattttgggt

SEQ ID NO: 1923 - DNA, 4789 bp, Homo sapiens
ccgcagtccgctccctcccgctccgctcgcccctgcccgcccgcccgcccggtcgcgcggtcgccgccgccaccgtgtcgcccgcatcctccgcctggcgcctccgggccccgtgcctccgcccgccctctccggccccggcgacgaggtaacgcgccctgggccgagccgccgggccctccgcccagagcgccgccctccgagctcgccccggtgggtgtggcccggcctggcccgtgccccgctgccgcacttcggtccctcccgagccccgccgccgcatttcggcctcctccggccgcccgtagttccagttcccctttccccaccacggagccccagggcccctgggcttgtcgagatgtctgaggcgtcaggaaatctcaacagcctccgcatggcgaatgtggccctgcgcgaagaattaaatgcccttcgcggggagaatgccaatttgggcctccagctcgggagagccctggccgaggttaattccttgcggggcaatgtctccagctacatccgctggccagtacccatagtgcccgtccttgcggaggagaacttggagttcgcgctcagtgagatcgaagtcattcccgggggagaactgcccttcttgtgccggcctcccccacgcgcggagcccgactgtatctcggatgatcttttgattaacgtgatccaggatcgcagcacccccgacgggcccgctgacccccctctgctgcccatcccgcccccgccggcgctgcctccgcccgcgtcaaaggaaccgcccccgcaaccccctctggcaccgctggagcggcctgagatagagcccttttcaggagacccagtctacctggctgaattcctgatgcagctagagaccttcatagccgaccatgaggttcatttccccgggggcgccgagcgggtggcctttctgatctcctttttcactggcgaagccaaggactgggccatctcggtcacccaggaaggaagccccttgcatgccaacttcccgcgcttcctggatgaaatccgtaaggaattctgtggccccatccccccacgtgtggctaaaaaggccattcgcaagctcaagcagggccactgtaccctcggcagctatgcagatgcttttcagttcctggcccaattcttgtcttgggatgactgccgcctccaaaaccaattcctcaaaggcctgtcggaattcttccgcaaagagctcttatggtcaacagaaatggccgacctggatgagctgattctcgaatgtgtggagatagaaagaaaagtgcgcgttcccaagcctatcccgctccctggagttcgaaatatcatcttcccttttgctccgagtcccaatgaggaagaaagtgaagatgaagagtactacagtgaagatgaagaccaagaggcacgcaggcacaggcttcactccaaggaccagaggaagcgcatgagggcttttcagcaagagatgaaggagaaggaggaggaggagatgaagaaggaggaagaaatgaagaagaaggaagagaaggaggaggaggaggaagaggaaatgaaacagaaagaggaggaggaggagataaggaacaagaatgaggaggaaggagagagtaaggatgaagaagatgaagatgaggatgggggccagaaaccagaaggagagccacagcaggatccagggactgaggagacctatggtgaggtggaggaggagccactggatgaggcccaagatgatgacctagatgagctgatggagatggagccgacctttgttcacgcgtcatcccagacttctggccccacaagtggttaccacgccgaaaacttcctgggtgcatcacctcccataatacagcctagcagacggaggaaccagaatcgagtcccacttctggaaggccttccaggcaccaattcaccattctacagctccccccaactgattcgccgcacaggtcgtttaggacaacgccaagttcgaagacgcccccctgtgcttttccgcctcactccgagacaggggggccaccgagctgctcgtggccgaattcgagtttgagtgctggggccagatggccacccagaacacacccttcttttgcatcccccgcccctgctattgctgccatacctgccccatttgctgaccaggacttcagggagtttcagacctgcagaacctgaagaagacctgcagaattccagaccatcttgcaaccgtgaccagagagcgacgtgtgcccaaccagggccacctgggaaaggagggatcagcaatagctgccctcttggcatgtactctgctcagtccggccacgagctggagagcaagtttctgggcctgttcccataaatgaactggtcaccctcttgtatttcccctctggttgttcctaaccctcacctctcctgcgtttcttcaccctatgttctacagttttattctctgactgacccaccaggacttcacccaatgcctcactgatctgccccaatgagcaagaggacaggctaccctgaactcctaaagccactgaggccagttgctagatataatcgatggtgagcaggatggtatccagaaatgtccctagaatcctacactcatttcatgccacacctccagcagagggcctggaagaggacccgacatctagcccagtgagagtgtgcaaagccacatgtcaaatggacaacttgacggagatttgcccttgactgactgtgcaggctggttccacttacagcacttgagtttacctttgcacagattcctgtatcagggctcttggactgacttgccacacatctggagccctttcctctcaccacattgccctcctgggcacccccggtggacagcgcccaacattgcaggctccacaactttccttgatgttgcctaaagggtagccagttagggttccggagaggagaaggaggaagaagaggaggaggagaaagaagcagcaacgatcattctgccattgtaaagagtgactctttccttagggatggtggtcttctccccttgccaggccttggactgcagcccccagtcaaaggtctttgcaggacactttctatccttggagttgcagaggaggcctgattggccattccttctgggacagacagagagagggcccatggcctgctctgagctcccttcaatttcaaggaacccttagttctgagaggagagaggaaggctgcacctaccgtggcctcacagctgggacccctcatgggggccaacccctggcctgctgctgtgcttcagtgacacagtaaagcttaagagggtggctgcctcctaggaactcctgggacttctaggtacaaactcaggtgcccttataaagagacccactgcttgccttgagtccagaaagcactgcttctgcagtgaaaaacacacacttactatgtcagttttggccataaaatgccagccaaatccactgctggcctgaactgcccctggacactggactttctgcacagtgactggcagcagagcaagtgcagccagggtttgtggccaaagggaagaaagcatagtaaattcaacctctgttcctcatgggagtctgaccgataatctcaggcggaccttaggatcttgggcctggaggcaagagaaaaaagctggaggaagaggagtcgcagagaaacccagtcctctgactggtttctggtgaggtctctattcatcagtgggaggtaagatgcccttttcattagcgcttttgtttctcagcctggggatcagtggatttggattcctataacctgttgctaccttttaaaaagatcccctctctccaaagagaaaagtaatacataatcattaaagaaagtttggaaaatagagaaaactatgaggacaaaaaccccccagccattcagagtcccaccacacagaggcaagcactattaacactttgctgctttcctttctagtgtgttcttgctatgtcttgtcaaagctgagatcaccctgccagttcttgatcagcaggatttaaaatggctgccacctgtgcagtcatgcatactgaataattcatttaagcattctcctaatttgttggacctttcaattgtctggttttccccatccccaccagggcaggagtaaacaactttgtaaagaaaattttgtctgtttttcagctgattttatctgatttcctcaagagtgcattccagaaggggacctgctattcttcgaggggacctgctattcttcgaggcagtggaccctgtttgctgatggtcaacactctggccctgctgccccatgtccctgtggagaagtgtgaaggacgggtgccttaaacccacacttccagggacccttcagcacaggtcctgcctgttcccatggtgcttctcaccctgaaccctcagagctacagccagggatagagcagatgagcagtgagctggtttccaccctctggggcaggaggggcttgggcttccctttgaccctcttccttcctttcccagatcttcaatatttgttgtgatgtaacagccataagagctgtaagaggaactgtgggctttgggagctttcttgggttgaaagaggggtggggggaggggatgcatgcaggggtatgaaggcagcccaaggtctcccagaggctcgggaggaaacccttttggaatacatgtgttattgttgcattactgtgttgtgaagataagaagctgctctgtatgctaaagctttctctcctcaataaaaatataaagggtgtgt

SEQ ID NO: 1924 - DNA, 4024 bp, Homo sapiens
cgctgaaggaaggtgggaagccatcagagcaggaagataaaataactgcacaacttactcaaaacccaggacaaattcagagagtcaaggatggaactttgggctccccagaggctgccccagacacgagggaaggccacagcaccctcaaaggatccagaccgagggtttcggagagatggacatcatcggcctgtccctcactcttggcacaatggagagaggtttcaccaatggcaagacaaccgtgggagcccccagccacagcaggagcccagggcagaccatcagcagcagccccattatgcatccaggccaggggactggcatcagcctgtgtctggagttgactattacgaaggtggttatcgcaatcagttgtattcaaggccaggttatgagaattcatatcagagctatcagtctcccacaatgagggaggaatatgcttatggaagttattactatcatggacacccacagtggctgcaggaagaaagagtgccaaggcaacggagtccttatatctggcacgaagattaccgagagcaaaagtaccttgatgaacatcattatgaaaaccagcacagtccatttggaacaaatagtgagacccacttccaatctaacagtaggaacccttgtaaagacagccctgcttccaactctggacaggagtggccgggggagctgtttccagggagcctgcttgctgaggcccagaaaaataagccatcattggctagtgagtccaaccttctccagcagcgtgagtctggtctcagctccagcagctatgagctcagtcagtacatcagagatgccccggagcgggatgatcccccagcttcagcagcttggagtccagttcaggctgatgtctcctcagctggtcccaaagcacccatgaagttctacatccctcatgttcctgtgagtttcgggccaggaggtcagctggtgcatgtaggtcccagctctcccactgacgggcaagcagcccttgttgaactgcacagcatggaggttattcttaatgattccgaagagcaagaggagatgagaagtttctcaggacccttgattagggaagatgtacataaggtggatattatgacgttttgccagcagaaagcagctcagagctgcaaatctgagacactggggagcagagactcagctctactgtggcagctcttggttctcctttgtcgccagaatgggtccatggtggggtctgacatcgctgagctgctaatgcaagactgcaagaagctggagaagtacaagcggcagccccctgtggccaacctcatcaacctgaccgatgaggactggccagtgctgagctctgggaccccgaacctgctcacgggagagatcccccccagtgtggagacacctgcgcagatcgtggagaaattcactaggctgctctactatggaaggaagaaggaagccttggagtgggccatgaagaaccacttgtggggccatgctttgttcctgtccagcaagatggacccacagacctacagctgggtcatgagtggcttcaccagcacgctggcgctcaatgacccactgcagaccctcttccagctcatgtcggggaggattccacaggcagccacgtgttgtggagaaaagcagtggggagactggaggcctcacttggctgtgattctgtcgaatcaggctggggacccagagctgtatcagcgtgcgattgttgccattggggacaccctggctgggaaggggcttgtggaggcagctcacttctgctatctcatggctcacgtgccctttggccactacaccgtgaagacagaccatctggtcttgctgggcagcagccacagtcaagagtttttgaaatttgcaacaactgaggcaatccagaggacggaaatcttcgagtactgtcagatgctgggccgccccaaatccttcatcccttctttccaggtgtataagctcctttatgcttcccgtctggcagattatggcctcgtgtcccaggctttgcattactgcgaagccattggtgcagctgtcttgagccagggagagagcagtcaccctgtgctattagtggaactcatcaagctagcagagaaactgaagctgtcagatcctctggttttagaaagacgcagtggagacagggacctggagccagattggctagcgcaacttcggaggcagctggagcaaaaggtagcaggagacattggggatcctcatcctactcgctcagatatttcgggagccggaggaacaacaacagaaaacactttctaccaggacttttctggatgtcaaggctactctgaagcccctgggtaccgctcagctctgtggctgacacctgagcagacctgcctgctccagcccagcccacagcagccctttcccctccagccgggctcctacccagcaggagggggtgcagggcagacagggacaccgaggcctttttactcagttcctgagacccatctaccagggactggcagcagcgtggcagtgacagaggccactggaggaacagtctgggaggaaatgctgcagacacacctgggccctggagagaacacagtgtctcaagaaacttcccagcctcctgatggccaagaggtcatttccaaaccacagacaccattggctgctagaccacgaagtatttctgagagttccgccagttcagccaaggaggatgagaaggagtcctctgatgaggctgataaaaactctccccgaaatactgcccagagaggcaagctcggagatgggaaggagcatacaaagagctcagggtttggctggttcagctggtttcgatcgaagcccaccaagaacgcatcccccgctggagacgaggactcctcagacagccctgactctgaggagacccccagagcatcttctccccaccaggctggcctgggcctctcactgacaccttcccctgagtccccacctctgccggatgttagtgccttctccaggggcagaggtgggggtgaaggccgaggatccgcatccagcgggggagcagctgcgggcgctggggttggaggcttgtctggaccagagagtgtttcctttgagctctgctccaaccctggtgttcttcttcctccacctgccttaaaaggggctgttcctctttacaacccatctcaggtgcctcagctgcccacggccactagcctgaatcggccaaatcgcctagctcagcgtcgctatcccacccagccatgctgagaataaacacacgtcccaggctcatctcccaggactgaaactttcttgctctctttttctcaatctcccagcccctctctaccatattgggaccctcaagaggtttgtgctagcccgatgcctccaccgggcacttagaaggcaagaggacaggatctctcaagacacagcacaattcagtctcttaagattagcttcacaatgatggaaattatttcatcaggtggaaagtctgggtctaatagcagactgcacatgagcagagtgacatggtggtggcacttatggtggtggcttgagagccttggggaaattagggccctaacagctagaatcaaagatgataccgcagggccctgtagcaagaaatgggaagcagggggaggggcaggggctcagaacaatattctagaccaactttgactacttcctgtcttagtaatagaccaatacatggctctatttagcaaagtttttatactgaaacttgattattgctgccctttataatttcctcttcaatgatatttcagcagtttccctcttggtcctagttttgtgcacatttttttgaatgtggttcagattaattatatttctctcactttcttagctggtcctattttttcacattctggcatgtggctatcaagttagattgctgtaggcatcatattgtcatggtaactactgaacctaatgatgcagatggatggcacatcagtataataaatgatggaaaacggttcct

SEQ ID NO: 1925 - DNA, 2897 bp, Homo sapiens
taaacccatctcctcctatgccacctgcctgggcccctcctgggactttatcactgtgccacactttttggaactactggttagaaggtgagtgtccatccccctccaagacacagaggtgcctctgtcccctactggctctgtcttgaagatgcacctctcggagcctcggttggctcctctggaacagggagtagtgagaagacgaacctcacagggttcttgtagggactcaatgatctaagacacagcaaacaaaggggtccctagagcctaaaactctggaaaatctgctgggggtgctgtgattcatgtttgttacttttctcttccccctcacttgaagcagctctcagcattctgcctcaatggcctgtatcactcactgtttggaaaaacacatagaaaccaagtctgcgatggcactggtaaaggatgtctgagattccttctggctggtctttctccttgacacagacagaagaggggtcccttggtgctgaaaaaggagccacaggcccactcagacatctggagaggctcactggggttctccaaaggttggggttcactcattcaacacatacattcaaaacacctcatttgtgcatcgctcttcttggggcttggcataatttcataaacaaagcagatgacaatcccccggccttgattctactcagagtcaggcactcacagtagacagaataaacaagtcatatctacagaatgttacaggtgagaccctcatggcctcctctacgtatggtggcatcctcccagattctgactagaatgacgcagcccagcaacaaatataaactgggtggatttagggttctgaagggccttttcacccacaaaacatgggggaaaatatgtggactctggctggggagagactaaaggagctctggggctcatacttcttataattcccacgagaaggctgacatctggggacttcccccacaagaggcaaatagtgagttctgtaaatggagacttaggtcccctgcaaagcagaggggaggctggggtcacagctggccactgagagacccatccccctcagcaccgtggcttcccagctctccctgtcctcctccccccgacatctgccccttccctcctaaccccaggaccaggggacccagatctggagctttgatgaggaagctgctcacaaatctgcctgcagctgcagtcttgagtgcccaggtgtacagtgctgtgctccagggcctttgggaagagaatgtctgtgggacgccagggcgcacgagggtctgtacagccctgctgtatggccaggtctgccccttccaggacagcactgatggcttacgcaccatcacctccattttgttcaactggccccccgaaaacacttcagtttactatcagcccccgcaacggtcatctttccggataaagctggccttcaggaacctctcctggcctggactgggcttggaggaccatcaggaaattgtcctaggccagttggtgcttccggagcccaacgaggccaagccagatgatcctgctccacgtcctgggcaacacgcattaacaatgccggccctggagccagcaccaccactgctggcggacctggggcctgctctggagccagagtcacctgcagccctgggtccaccaggatatctacattcagcaccagggccagcaccagcaccaggggaagggccccctccagggacagtgctggagccacagtcagccccagagtcctcctgtccctgtcgtgggtctgtaaagaaccaacccagtgaggagctgcctgacatgacgaccttccctcccaggctgctggcagagcagctgaccctcatggatgcggagctgttcaagaaggtggtgctccacgaatgcttgggctgcatctggggccaaggacatctgaaggggaatgagcacatggcacccacagttcgtgccaccatcgcacacttcaacaggctcaccaactgcatcaccacctcctgcctcggggaccacagcatgagggcccgggacagggccagggtggtggagcactggatcaaggtggccagggagtgcctaagcctcaacaacttctcctcggtgcacgtcatcgtctctgctctgtgcagcaacccaataggtcagctacacaagacgtgggcaggagtgtccagcaaaagcatgaaagagctaaaagaactctgcaaaaaagacactgcagtgaagagggacctactgatcaaggcggggagctttaaggtggccacccaggagaggaacccccagagagtccagatgaggctgcggaggcagaagaagggtgtggtccccttcctgggggattttctgactgagttacagaggctggattcggccatcccggacgacctggatggcaacaccaacaagaggagcaaggaggtccgagttctgcaggaaatgcagctgctccaagtggctgccatgaattacaggcttcggcctcttgagaaatttgtcacctatttcacaagaatggagcagctcagtgacaaagagagctacaagctgtcctgccagctggagcccgaaaacccgtaggctggcaacatcctgcagtggctgggaacccaccgggatgctggccagaacaccggctctgcaccatccctcacccagaccgtagacaccagggaaccacatctaggaggctggcagctcagctgcatcttgccctggatcctcatcaccaactgctcctgctggccaggatcaggccatgggacttttgtgagtcaggcgggagaccattttatgtttattttctttagtgtataagtaagggttttttcttaactttcgttaaaataaaattttaaaaaactattcaaaataaaaaaaaaaaa

SEQ ID NO: 1926 - DNA, 1803 bp, Homo sapiens
ggcccggtctggagtttgcggagggccgagccgggtgcgcacggggaggcggaggcagcggcggcggcggcggcggcggcggcggcggcggagcagatcttctggtgaccccacttctcgctgctcatgccgctgggactggggcggcggaaaaaggcgccccctctagtggaaaatgaggaggctgagccaggccgtggagggctgggcgtgggggagccagggcctctgggcggaggtgggtcggggggcccccaaatgggcttgcccccccctcccccagccctgcggccccgcctcgtgttccacacccagctggcccatggcagtcccactggccgcatcgagggcttcaccaacgtcaaggagctgtatggcaagatcgccgaggccttccgcctgccaactgccgaggtgatgttctgcaccctgaacacccacaaagtggacatggacaagctcctggggggccagatcgggctggaggacttcatcttcgcccacgtgaaggggcagcgcaaggaggtggaggtgttcaagtcggaggatgcactcgggctcaccatcacggacaacggggctggctacgccttcatcaagcgcatcaaggagggcagcgtgatcgaccacatccacctcatcagcgtgggcgacatgatcgaggccattaacgggcagagcctgctgggctgccggcactacgaggtggcccggctgctcaaggagctgccccgaggccgtaccttcacgctgaagctcacggagcctcgcaaggccttcgacatgatcagccagcgttcagcgggtggccgccctggctctggcccacaactgggcactggccgagggaccctgcggctccgatcccggggccccgccacggtggaggatctgccctctgcctttgaagagaaggccattgagaaggtggatgacctgctggagagttacatgggtatcagggacacggagctggcggccaccatggtggagctgggaaaggacaaaaggaacccggatgagctggccgaggccctggacgaacggctgggtgactttgccttccctgacgagttcgtctttgacgtctggggcgccattggggacgccaaggtcggccgctactaggactgcccccggaccctgcgatgatgacccgggcgcaacctggtgggggcccccagcagggacactgacgtcaggacccgagcctccagcctgagcctagctcagcagcccaaggacgatggtgaggggaggtggggccaggccccctgccccgctccaatcggtaccatcccctccctggttcccagtctggccggggtccccggcccccctgtgccctgttccccacctacctcagctgggtcaggcacagggaggggagggatcagccaaattgggcggccacccccgcctccaccactttccaccatcagctgccaaactggtccctctgtctccctggggccttgggttctgtttgggggtcatgaccttcctagtttcctgacgcagggaatacaggggagagggttgtccttccccccagcaaatgcaataatgccctcacccctcctgagaggagccccctccctgtggagcctgttacctccgcatttgacacgagtctgctgtgaaccccgcaacctcctccccacctcccatctctccttccaggcccatccctggcccagagcaggagggagggagggacgatggcggtgggtttttgtatctgaatttgctgtcttgaacataaagaatctatctgctgttggaaaaaaaaaaaaaaaaaaa

SEQ ID NO: 1927 - DNA, 1485 bp, Homo sapiens
ggcccggtctggagtttgcggagggccgagccgggtgcgcacggggaggcggaggcagcggcggcggcggcggcggcggcggcggcggcggagcaggtgatgttctgcaccctgaacacccacaaagtggacatggacaagctcctggggggccagatcgggctggaggacttcatcttcgcccacgtgaaggggcagcgcaaggaggtggaggtgttcaagtcggaggatgcactcgggctcaccatcacggacaacggggctggctacgccttcatcaagcgcatcaaggagggcagcgtgatcgaccacatccacctcatcagcgtgggcgacatgatcgaggccattaacgggcagagcctgctgggctgccggcactacgaggtggcccggctgctcaaggagctgccccgaggccgtaccttcacgctgaagctcacggagcctcgcaaggccttcgacatgatcagccagcgttcagcgggtggccgccctggctctggcccacaactgggcactggccgagggaccctgcggctccgatcccggggccccgccacggtggaggatctgccctctgcctttgaagagaaggccattgagaaggtggatgacctgctggagagttacatgggtatcagggacacggagctggcggccaccatggtggagctgggaaaggacaaaaggaacccggatgagctggccgaggccctggacgaacggctgggtgactttgccttccctgacgagttcgtctttgacgtctggggcgccattggggacgccaaggtcggccgctactaggactgcccccggaccctgcgatgatgacccgggcgcaacctggtgggggcccccagcagggacactgacgtcaggacccgagcctccagcctgagcctagctcagcagcccaaggacgatggtgaggggaggtggggccaggccccctgccccgctccaatcggtaccatcccctccctggttcccagtctggccggggtccccggcccccctgtgccctgttccccacctacctcagctgggtcaggcacagggaggggagggatcagccaaattgggcggccacccccgcctccaccactttccaccatcagctgccaaactggtccctctgtctccctggggccttgggttctgtttgggggtcatgaccttcctagtttcctgacgcagggaatacaggggagagggttgtccttccccccagcaaatgcaataatgccctcacccctcctgagaggagccccctccctgtggagcctgttacctccgcatttgacacgagtctgctgtgaaccccgcaacctcctccccacctcccatctctccttccaggcccatccctggcccagagcaggagggagggagggacgatggcggtgggtttttgtatctgaatttgctgtcttgaacataaagaatctatctgctgttggaaaaaaaaaaaaaaaaaaa

SEQ ID NO: 1928 - DNA, 1891 bp, Homo sapiens
ggcccggtctggagtttgcggagggccgagccgggtgcgcacggggaggcggaggcagcggcggcggcggcggcggcggcggcggcggcggagcaggaccattctggctgctgtctggacaagaagtcgtagggggtgagggtggaagctgggaaacccacaggaggcaaccacactagtttagatcttctggtgaccccacttctcgctgctcatgccgctgggactggggcggcggaaaaaggcgccccctctagtggaaaatgaggaggctgagccaggccgtggagggctgggcgtgggggagccagggcctctgggcggaggtgggtcggggggcccccaaatgggcttgcccccccctcccccagccctgcggccccgcctcgtgttccacacccagctggcccatggcagtcccactggccgcatcgagggcttcaccaacgtcaaggagctgtatggcaagatcgccgaggccttccgcctgccaactgccgaggtgatgttctgcaccctgaacacccacaaagtggacatggacaagctcctggggggccagatcgggctggaggacttcatcttcgcccacgtgaaggggcagcgcaaggaggtggaggtgttcaagtcggaggatgcactcgggctcaccatcacggacaacggggctggctacgccttcatcaagcgcatcaaggagggcagcgtgatcgaccacatccacctcatcagcgtgggcgacatgatcgaggccattaacgggcagagcctgctgggctgccggcactacgaggtggcccggctgctcaaggagctgccccgaggccgtaccttcacgctgaagctcacggagcctcgcaaggccttcgacatgatcagccagcgttcagcgggtggccgccctggctctggcccacaactgggcactggccgagggaccctgcggctccgatcccggggccccgccacggtggaggatctgccctctgcctttgaagagaaggccattgagaaggtggatgacctgctggagagttacatgggtatcagggacacggagctggcggccaccatggtggagctgggaaaggacaaaaggaacccggatgagctggccgaggccctggacgaacggctgggtgactttgccttccctgacgagttcgtctttgacgtctggggcgccattggggacgccaaggtcggccgctactaggactgcccccggaccctgcgatgatgacccgggcgcaacctggtgggggcccccagcagggacactgacgtcaggacccgagcctccagcctgagcctagctcagcagcccaaggacgatggtgaggggaggtggggccaggccccctgccccgctccaatcggtaccatcccctccctggttcccagtctggccggggtccccggcccccctgtgccctgttccccacctacctcagctgggtcaggcacagggaggggagggatcagccaaattgggcggccacccccgcctccaccactttccaccatcagctgccaaactggtccctctgtctccctggggccttgggttctgtttgggggtcatgaccttcctagtttcctgacgcagggaatacaggggagagggttgtccttccccccagcaaatgcaataatgccctcacccctcctgagaggagccccctccctgtggagcctgttacctccgcatttgacacgagtctgctgtgaaccccgcaacctcctccccacctcccatctctccttccaggcccatccctggcccagagcaggagggagggagggacgatggcggtgggtttttgtatctgaatttgctgtcttgaacataaagaatctatctgctgttggaaaaaaaaaaaaaaaaaaa

SEQ ID NO: 1929 - DNA, 1573 bp, Homo sapiens
ggcccggtctggagtttgcggagggccgagccgggtgcgcacggggaggcggaggcagcggcggcggcggcggcggcggcggcggcggcggagcaggaccattctggctgctgtctggacaagaagtcgtagggggtgagggtggaagctgggaaacccacaggaggcaaccacactagtttaggtgatgttctgcaccctgaacacccacaaagtggacatggacaagctcctggggggccagatcgggctggaggacttcatcttcgcccacgtgaaggggcagcgcaaggaggtggaggtgttcaagtcggaggatgcactcgggctcaccatcacggacaacggggctggctacgccttcatcaagcgcatcaaggagggcagcgtgatcgaccacatccacctcatcagcgtgggcgacatgatcgaggccattaacgggcagagcctgctgggctgccggcactacgaggtggcccggctgctcaaggagctgccccgaggccgtaccttcacgctgaagctcacggagcctcgcaaggccttcgacatgatcagccagcgttcagcgggtggccgccctggctctggcccacaactgggcactggccgagggaccctgcggctccgatcccggggccccgccacggtggaggatctgccctctgcctttgaagagaaggccattgagaaggtggatgacctgctggagagttacatgggtatcagggacacggagctggcggccaccatggtggagctgggaaaggacaaaaggaacccggatgagctggccgaggccctggacgaacggctgggtgactttgccttccctgacgagttcgtctttgacgtctggggcgccattggggacgccaaggtcggccgctactaggactgcccccggaccctgcgatgatgacccgggcgcaacctggtgggggcccccagcagggacactgacgtcaggacccgagcctccagcctgagcctagctcagcagcccaaggacgatggtgaggggaggtggggccaggccccctgccccgctccaatcggtaccatcccctccctggttcccagtctggccggggtccccggcccccctgtgccctgttccccacctacctcagctgggtcaggcacagggaggggagggatcagccaaattgggcggccacccccgcctccaccactttccaccatcagctgccaaactggtccctctgtctccctggggccttgggttctgtttgggggtcatgaccttcctagtttcctgacgcagggaatacaggggagagggttgtccttccccccagcaaatgcaataatgccctcacccctcctgagaggagccccctccctgtggagcctgttacctccgcatttgacacgagtctgctgtgaaccccgcaacctcctccccacctcccatctctccttccaggcccatccctggcccagagcaggagggagggagggacgatggcggtgggtttttgtatctgaatttgctgtcttgaacataaagaatctatctgctgttggaaaaaaaaaaaaaaaaaaa

SEQ ID NO: 1930 - DNA, 1947 bp, Homo sapiens
ggcccggtctggagtttgcggagggccgagccgggtgcgcacggggaggcggaggcagcggcggcggcggcggcggcggcggcggcggcggagcagatgaagaaactgaggccctgtgatgtgaagtgacttgccccccagccacacagctggaccattctggctgctgtctggacaagaagtcgtagggggtgagggtggaagctgggaaacccacaggaggcaaccacactagtttagatcttctggtgaccccacttctcgctgctcatgccgctgggactggggcggcggaaaaaggcgccccctctagtggaaaatgaggaggctgagccaggccgtggagggctgggcgtgggggagccagggcctctgggcggaggtgggtcggggggcccccaaatgggcttgcccccccctcccccagccctgcggccccgcctcgtgttccacacccagctggcccatggcagtcccactggccgcatcgagggcttcaccaacgtcaaggagctgtatggcaagatcgccgaggccttccgcctgccaactgccgaggtgatgttctgcaccctgaacacccacaaagtggacatggacaagctcctggggggccagatcgggctggaggacttcatcttcgcccacgtgaaggggcagcgcaaggaggtggaggtgttcaagtcggaggatgcactcgggctcaccatcacggacaacggggctggctacgccttcatcaagcgcatcaaggagggcagcgtgatcgaccacatccacctcatcagcgtgggcgacatgatcgaggccattaacgggcagagcctgctgggctgccggcactacgaggtggcccggctgctcaaggagctgccccgaggccgtaccttcacgctgaagctcacggagcctcgcaaggccttcgacatgatcagccagcgttcagcgggtggccgccctggctctggcccacaactgggcactggccgagggaccctgcggctccgatcccggggccccgccacggtggaggatctgccctctgcctttgaagagaaggccattgagaaggtggatgacctgctggagagttacatgggtatcagggacacggagctggcggccaccatggtggagctgggaaaggacaaaaggaacccggatgagctggccgaggccctggacgaacggctgggtgactttgccttccctgacgagttcgtctttgacgtctggggcgccattggggacgccaaggtcggccgctactaggactgcccccggaccctgcgatgatgacccgggcgcaacctggtgggggcccccagcagggacactgacgtcaggacccgagcctccagcctgagcctagctcagcagcccaaggacgatggtgaggggaggtggggccaggccccctgccccgctccaatcggtaccatcccctccctggttcccagtctggccggggtccccggcccccctgtgccctgttccccacctacctcagctgggtcaggcacagggaggggagggatcagccaaattgggcggccacccccgcctccaccactttccaccatcagctgccaaactggtccctctgtctccctggggccttgggttctgtttgggggtcatgaccttcctagtttcctgacgcagggaatacaggggagagggttgtccttccccccagcaaatgcaataatgccctcacccctcctgagaggagccccctccctgtggagcctgttacctccgcatttgacacgagtctgctgtgaaccccgcaacctcctccccacctcccatctctccttccaggcccatccctggcccagagcaggagggagggagggacgatggcggtgggtttttgtatctgaatttgctgtcttgaacataaagaatctatctgctgttggaaaaaaaaaaaaaaaaaaa

SEQ ID NO: 1931 - DNA, 1629 bp, Homo sapiens
ggcccggtctggagtttgcggagggccgagccgggtgcgcacggggaggcggaggcagcggcggcggcggcggcggcggcggcggcggcggagcagatgaagaaactgaggccctgtgatgtgaagtgacttgccccccagccacacagctggaccattctggctgctgtctggacaagaagtcgtagggggtgagggtggaagctgggaaacccacaggaggcaaccacactagtttaggtgatgttctgcaccctgaacacccacaaagtggacatggacaagctcctggggggccagatcgggctggaggacttcatcttcgcccacgtgaaggggcagcgcaaggaggtggaggtgttcaagtcggaggatgcactcgggctcaccatcacggacaacggggctggctacgccttcatcaagcgcatcaaggagggcagcgtgatcgaccacatccacctcatcagcgtgggcgacatgatcgaggccattaacgggcagagcctgctgggctgccggcactacgaggtggcccggctgctcaaggagctgccccgaggccgtaccttcacgctgaagctcacggagcctcgcaaggccttcgacatgatcagccagcgttcagcgggtggccgccctggctctggcccacaactgggcactggccgagggaccctgcggctccgatcccggggccccgccacggtggaggatctgccctctgcctttgaagagaaggccattgagaaggtggatgacctgctggagagttacatgggtatcagggacacggagctggcggccaccatggtggagctgggaaaggacaaaaggaacccggatgagctggccgaggccctggacgaacggctgggtgactttgccttccctgacgagttcgtctttgacgtctggggcgccattggggacgccaaggtcggccgctactaggactgcccccggaccctgcgatgatgacccgggcgcaacctggtgggggcccccagcagggacactgacgtcaggacccgagcctccagcctgagcctagctcagcagcccaaggacgatggtgaggggaggtggggccaggccccctgccccgctccaatcggtaccatcccctccctggttcccagtctggccggggtccccggcccccctgtgccctgttccccacctacctcagctgggtcaggcacagggaggggagggatcagccaaattgggcggccacccccgcctccaccactttccaccatcagctgccaaactggtccctctgtctccctggggccttgggttctgtttgggggtcatgaccttcctagtttcctgacgcagggaatacaggggagagggttgtccttccccccagcaaatgcaataatgccctcacccctcctgagaggagccccctccctgtggagcctgttacctccgcatttgacacgagtctgctgtgaaccccgcaacctcctccccacctcccatctctccttccaggcccatccctggcccagagcaggagggagggagggacgatggcggtgggtttttgtatctgaatttgctgtcttgaacataaagaatctatctgctgttggaaaaaaaaaaaaaaaaaaa

SEQ ID NO: 1932 - DNA, 1344 bp, Homo sapiens
aaacagccggggctccagcgggagaacgataatgcaaagtgctatgttcttggctgttcaacacgactgcagacccatggacaagagcgcaggcagtggccacaagagcgaggagaagcgagaaaagatgaaacggacccttttaaaagattggaagacccgtttgagctacttcttacaaaattcctctactcctgggaagcccaaaaccggcaaaaaaagcaaacagcaagctttcatcaagccttctcctgaggaagcacagctgtggtcagaagcatttgacgagctgctagccagcaaatatggtcttgctgcattcagggcttttttaaagtcggaattctgtgaagaaaatattgaattctggctggcctgtgaagacttcaaaaaaaccaaatcaccccaaaagctgtcctcaaaagcaaggaaaatatatactgacttcatagaaaaggaagctccaaaagagataaacatagattttcaaaccaaaactctgattgcccagaatatacaagaagctacaagtggctgctttacaactgcccagaaaagggtatacagcttgatggagaacaactcttatcctcgtttcttggagtcagaattctaccaggacttgtgtaaaaagccacaaatcaccacagagcctcatgctacatgaaatgtaaaagggagcccagaaatggaggacatttcattctttttcctgaggggaaggactgtgacctgccataaagactgaccttgaattcagcctgggtgttcaggaaacatcactcagaactattgattcaaagttgggtagtgaatcaggaagccagtaactgactaggagaagctggtatcagaacagcttccctcactgtgtacagaacgcaagaagggaataggtggtctgaacgtggtgtctcactctgaaaagcaggaatgtaagatgatgaaagagacaatgtaatactgttggtccaaaagcatttaaaatcaatagatctgggattatgtggccttaggtagctggttgtacatctttccctaaatcgatccatgttaccacatagtagttttagtttaggattcagtaacagtgaagtgtttactatgtgcaagggtattgaagttcttatgaccacagatcatcagtactgttgtctcatgtaatgctaaaactgaaatggtccgtgtttgcattgttaaaaatgatgtgtgaaatagaatgagtgctatggtgttgaaaactgcagtgtccgttatgagtgccaaaaatctgtcttgaaggcagctacactttgaagtggtctttgaatacttttaataaatttattttgataaataatattg

SEQ ID NO: 1933 - DNA, 3516 bp, Homo sapiens
agtccgccgtccgccctccgcgcccgcgccgctagcatgaccgacgcgctgttgcccgcggccccccagccgctggagaagaagaacgacggctactttcggaagggctgtaatccccttgcacaaaccggccggagtaaattgcagaatcaaagagctgctttgaatcagcagatcctgaaagccgtgcggatgaggaccggagcggaaaaccttctgaaagtggccacaaactcaaaggtgcgggagcaagtgcggctggagctgagcttcgtcaactcagacctgcagatgctcaaggaagagctggaggggctgaacatctcggtgggcgtctatcagaacacagaggaggcatttacgattcccctgattcctcttggcctgaaggaaacgaaagacgtcgactttgcagtcgtcctcaaggattttatcctggaacattacagtgaagatggctatttatatgaagatgaaattgcagatcttatggatctgagacaagcttgtcggacgcctagccgggatgaggccggggtggaactgctgatgacatacttcatccagctgggctttgtcgagagtcgattcttcccgcccacacggcagatgggactcctgttcacctggtatgactctctcaccggggttccggtcagccagcagaacctgctgctggagaaggccagtgtcctgttcaacactggggccctctacacccagattgggacccggtgtgatcggcagacgcaggctgggctggagagtgccatagatgcctttcagagagccgcaggggttttaaattacctgaaagacacatttacccatactccaagttacgacatgagccctgccatgctcagcgtgctcgtcaaaatgatgcttgcacaagcccaagaaagcgtgtttgagaaaatcagccttcctgggatccggaatgaattcttcatgctggtgaaggtggctcaggaggctgctaaggtgggagaggtctaccaacagctacacgcagccatgagccaggcgccggtgaaagagaacatcccctactcctgggccagcttagcctgcgtgaaggcccaccactacgcggccctggcccactacttcactgccatcctcctcatcgaccaccaggtgaagccaggcacggatctggaccaccaggagaagtgcctgtcccagctctacgaccacatgccagaggggctgacacccttggccacactgaagaatgatcagcagcgccgacagctggggaagtcccacttgcgcagagccatggctcatcacgaggagtcggtgcgggaggccagcctctgcaagaagctgcggagcattgaggtgctacagaaggtgctgtgtgccgcacaggaacgctcccggctcacgtacgcccagcaccaggaggaggatgacctgctgaacctgatcgacgcccccagtgttgttgctaaaactgagcaagaggttgacattatattgccccagttctccaagctgacagtcacggacttcttccagaagctgggccccttatctgtgttttcggctaacaagcggtggacgcctcctcgaagcatccgcttcactgcagaagaaggggacttggggttcaccttgagagggaacgcccccgttcaggttcacttcctggatccttactgctctgcctcggtggcaggagcccgggaaggagattatattgtctccattcagcttgtggattgtaagtggctgacgctgagtgaggttatgaagctgctgaagagctttggcgaggacgagatcgagatgaaagtcgtgagcctcctggactccacatcatccatgcataataagagtgccacatactccgtgggaatgcagaaaacgtactccatgatctgcttagccattgatgatgacgacaaaactgataaaaccaagaaaatctccaagaagctttccttcctgagttggggcaccaacaagaacagacagaagtcagccagcaccttgtgcctcccatcggtcggggctgcacggcctcaggtcaagaagaagctgccctcccctttcagccttctcaactcagacagttcttggtactaatgtgaggaaacaaacatgttcaggccctgaacatttccggtgctgactcggccttaaacgtttgtgccataatggaaaatatctatctatctgttctcaaatcctgtttttctcatagtgtaaactcacatttgatgtgtttttatgaaggaaagtaaccaagaaacctctaggaattagtgaaaaaagaacttttttgaggtgtgttactatactgctgtaagttatttattatataaagtattgtaaatagaatagtgttgaagatatgaaatatggctatttttaatggtgacaattatgacttttagtcactattaaattggggttacctatatcagtacaatttgtagttgtttccaggtttggctaataatcattccttaacctagaattcagatgatcctggaattaaggcaggtcagaggactgtaatgatagaattaaattagtgtcactaaaaactgtcccaaagtgctgcttcctaataggaattcattaacctaaaacaagatgttactattatatcgatagactatgaatgctatttctagaaaaagtctagtgccaaatttgtcttattaaataaaaacaatgtaggagcagcttttcttctagtttgatgtcatttaagaattactaacacagtggcagtgttagatgaagatgctgtctacaaggtagataatatactgtttgatactcaaaacatttttcattttgtttaaagtagaagttacataattctatattttaagtcttgggtaaaaaagtagttttacattttataaagtaaagatgtaaatgattcaggtttaaagctctatttgacttcctttttttgtttgagatagcgtcttgctgtgttgcccaggctggagtgcagtggtgtgatctcagctcagtgcaacctccgccccctgggatcaagcgattctcctacctcagcctcccaaatagctgggactacaaggtgccctccagcatgcctggctgatttttgtatttttagttgaggtgaggtttcaccatgttggccaggcgggtttcgaaatcctgacctcaaatgatccacccacctcagcctcccaaagtgctgggattacaggcatgagccaccacaaccgtcccactattttactttttaaaatgacattcctactgattgatttttatcttgctataagttcgatgacaccgtgaatctaataaggttcactgttgacacagtacaagttacatagctaaaatacatagcattgaagactaattttaaggattgacaagagtttattttctattgtgcaatatcttaaaggaagcaaccacctttgggaaagtgtatctgctgctcctagggccatgcttgtatacatatttaaataaacatattcatttacccgaaaaaaaaaaaaaaaa

SEQ ID NO: 1934 - DNA, 2714 bp, Homo sapiens
gcagggcacggtgggggctgagatcgtttcctgttggaacttctggcccaagaagcgcgggtcacaaggagaggggtcagttcggttcagagcgactcagcccctcgactcgggtcttaaaacctccgagccgccagttctgcctcaggccgcgcccccttaaagcgccaccagacgctgcgccccgttaaagcgccaccagacgccgcgccccgtcccggcctcccccgcgcgctggcgcggggctttctgggccagggcggggccggcgaactgcggcccggaacggctgaggaagggcccgtcccgccttccccggcgcgccatggagccccgggcggttgcagaagccgtggagacgggtgaggaggatgtgattatggaagctctgcggtcatacaaccaggagcactcccagagcttcacgtttgatgatgcccaacaggaggaccggaagagactggcggagctgctggtctccgtcctggaacagggcttgccaccctcccaccgtgtcatctggctgcagagtgtccgaatcctgtcccgggaccgcaactgcctggacccgttcaccagccgccagagcctgcaggcactagcctgctatgctgacatctctgtctctgaggggtccgtcccagagtccgcagacatggatgttgtactggagtccctcaagtgcctgtgcaacctcgtgctcagcagccctgtggcacagatgctggcagcagaggcccgcctagtggtgaagctcacagagcgtgtggggctgtaccgtgagaggagcttcccccacgatgtccagttctttgacttgcggctcctcttcctgctaacggcactccgcaccgatgtgcgccagcagctgtttcaggagctgaaaggagtgcgcctgctaactgacacactggagctgacgctgggggtgactcctgaagggaaccccccacccacgctccttccttcccaagagactgagcgggccatggagatcctcaaagtgctcttcaacatcaccctggactccatcaagggggaggtggacgaggaagacgctgccctttaccgacacctggggacccttctccggcactgtgtgatgatcgctactgctggagaccgcacagaggagttccacggccacgcagtgaacctcctggggaacttgcccctcaagtgtctggatgttctcctcaccctggagccacatggagactccacggagttcatgggagtgaatatggatgtgattcgtgccctcctcatcttcctagagaagcgtttgcacaagacacacaggctgaaggagagtgtagctcccgtgctgagcgtgctgactgaatgtgcccggatgcaccgcccagccaggaagttcctgaaggcccagggatggccacctccccaggtgctgccccctctgcgggatgtgaggacacggcctgaggttggggagatgctgcggaacaagcttgtccgcctcatgacacacctggacacagatgtgaagagggtggctgccgagttcttgtttgtcctgtgctctgagagtgtgccccgattcatcaagtacacaggctatgggaatgctgctggccttctggctgccaggggcctcatggcaggaggccggcccgagggccagtactcagaggatgaggacacagacacagatgagtacaaggaagccaaagccagcataaaccctgtgaccgggagggtggaggagaagccgcctaaccctatggagggcatgacagaggagcagaaggagcacgaggccatgaagctggtgaccatgtttgacaagctctccaggaacagagtcatccagccaatggggatgagtccccggggtcatcttacgtccctgcaggatgccatgtgcgagactatggagcagcagctctcctcggaccctgactcggaccctgactgaggatggcagctcttctgctcccccatcaggactggtgctgcttccagagacttccttggggttgcaacctggggaagccacatcccactggatccacacccgcccccacttctccatcttagaaaccccttctcttgactcccgttctgttcatgatttgcctctggtccagtttctcatctctggactgcaacggtcttcttgtgctagaactcaggctcagcctcgaattccacagacgaagtactttcttttgtctgcgccaagaggaatgtgttcagaagctgctgcctgagggcagggcctacctgggcacacagaagagcatatgggagggcaggggtttgggtgtgggtgcacacaaagcaagcaccatctgggattggcacactggcagagccagtgtgttggggtatgtgctgcacttcccagggagaaaacctgtcagaactttccatacgagtatatcagaacacacccttccaaggtatgtatgctctgttgttcctgtcctgtcttcactgagcgcagggctggaggcctcttagacattctccttggtcctcgttcagctgcccactgtagtatccacagtgcccgagttctcgctggttttggcaattaaacctccttcctactggtttagactacacttacaacaaggaaaatgcccctcgtgtgaccatagattgagatttataccacataccacacatagccacagaaacatcatcttgaaataaagaagagttttggacaaaaaaaaaaaaaaaaa

SEQ ID NO: 1935 - DNA, 2990 bp, Homo sapiens
ggccgttccgacctccggtcaggagggggaggaacagagcacggccggcggctgcacgggcagggcctctctgggctgagaggaagaaaccagtgagacatcgagaggaagtcgctgtggcactcagtcctacggcctccgaggctgggtagtgagtgtgtcgctggccttagccagactccacaggccacgctggctgcgaatggagccgaggactcgcgcggaggcgagatgctaccagccggcgagatcggcgcctctcctgcagccccgtgctgctctgaaagtggtgacgaaaggaagaacctcgaggagaaaagtgacataaatgttacagttcttattggaagtaaacaagtcagtgaaggtacagataatggtgatctcccttcttatgtgtctgcattcatagaaaaggaagttggaaatgaccttaaatctttaaagaaacttgataaactcatagaacagaggacagtaagtaaaatgcagttagaagaacaggtacttacaatttcatcagaaattcctaaaagaattcgaagtgccttaaaaaatgcagaagaatcaaagcaatttcttaatcagtttctggagcaggaaactcatctcttcagcgccattaacagccatttgctgactgcgcaaccttggatggacgatcttggaaccatgattagccagattgaagagatcgaacgtcatcttgcttaccttaaatggatttcacaaattgaagaactaagtgataacattcagcaatatctgatgaccaataatgtaccggaggcagcctccactctagtgtctatggcagaacttgacattaaacttcaggaatcatcttgtactcatcttcttggtttcatgagagccacagttaaattctggcataaaattctcaaggacaagcttacaagtgattttgaggaaattttagcacagcttcattggccattcatcgcaccccctcaatcacaaactgttggcttaagtcgacctgccagtgccccggagatatacagttacctggagacactgttttgtcagcttttgaaactacaaacctcagatgaattacttactgagccaaagcaactcccagaaaaatactctcttcctgcctccccttctgtcatcctgcccatccaggttatgctgactcctcttcagaagaggttcaggtatcacttcagagggaaccggcagactaatgtgttaagcaagccagaatggtacttggctcaagtacttatgtggattggaaaccatactgaatttctggatgagaagattcagccaatattagacaaagtaggctctttggtaaacgcaaggcttgaattttctcggggccttatgatgctggttcttgagaagttagccactgatattccttgtctgctatatgatgacaatctcttctgtcatttggtggatgaagtactcttgtttgaaagggagctacacagtgttcatggctatcctggcacttttgctagttgtatgcatattctatcagaggaaacctgttttcagagatggttgacggtggagagaaaatttgctcttcaaaaaatggactcaatgctttcctcagaagctgcctgggtatcgcaatataaggatatcactgacgtggatgaaatgaaagttccagattgtgcagaaacttttatgactctactcttggttataactgacaggtataaaaatcttcccacagcttcccgaaagcttcagttcctggagttacagaaggacttagtagatgattttaggatacgattaacacaagtgatgaaagaagagactagagcttcccttggctttcgatactgtgcaattcttaatgctgtgaactacatctcaacagtactagcagattgggctgacaatgttttctttctacaacttcaacaggctgcactggaggtgtttgcagagaataatactctgagtaaattgcagctaggacagctagcctctatggagagctctgtctttgatgacatgattaacctcttagaacgtttaaagcatgatatgttgacccgtcaagtagaccacgtttttagagaagttaaagatgctgcaaaattgtataaaaaagaaagatggttgtccttgccatctcagtcagagcaggcagtgatgtccctgtccagttcggcttgcccgttgctgctgacgttacgagaccatttacttcagttggagcagcagctttgtttctccttatttaaaattttctggcaaatgcttgtagagaagctggatgtatacatctaccaagaaataattcttgctaatcacttcaatgaaggaggagcagcccagctgcagtttgatatgactcggaatcttttccctttgttttctcactattgcaagagaccagaaaattattttaaacatataaaagaagcctgtattgttttgaatttgaacgtcggttctgcactactgctgaaagatgtactgcagtcagcttcagggcagcttcctgccacagcagcattaaatgaagttggaatttacaaactggctcaacaagatgttgagattctacttaatttgaggacaaattggcctaatactggaaaataatgtctttcagaaaaaggtttctttggtttttgtttctaagaaagaggaagccaattggatttcaagttatatgatgaaattctgaattaatgaaactggaaaactttatagaattacttattatcttggatttatggtgttattaaaatgctgaccatatttccttcatcctcttgttcctaaggaaacaaaaacagaaaacgaaacaatgaaaactcaattctatttacaagtataaatgctgagtatgtctgttgaagacgagcagagatattaaattataaccaactttcaatttcctgtgctaattaagggaaattctgttgtggataatcaaacatagccaataaatttttttaaaactccaaaaaaaaaaaaaa

SEQ ID NO: 1936 - DNA, 3864 bp, Homo sapiens
atgcaaccagacatgtccttgaatgtcattaagatgaaatccagtgacttcctggagagtgcagaactggacagcggaggctttgggaaggtgtctctgtgtttccacagaacccagggactcatgatcatgaaaacagtgtacaaggggcccaactgcattgagcacaacgaggccctcttggaggaggcgaagatgatgaacagactgagacacagccgggtggtgaagctcctgggcgtcatcatagaggaagggaagtactccctggtgatggagtacatggagaagggcaacctgatgcacgtgctgaaagccgagatgagtactccgctttctgtaaaaggaaggataattttggaaatcattgaaggaatgtgctacttacatggaaaaggcgtgatacacaaggacctgaagcctgaaaatatccttgttgataatgacttccacattaagatcgcagacctcggccttgcctcctttaagatgtggagcaaactgaataatgaagagcacaatgagctgagggaagtggacggcaccgctaagaagaatggcggcaccctctactacatggcgcccgagcacctgaatgacgtcaacgcaaagcccacagagaagtcggatgtgtacagctttgctgtagtactctgggcgatatttgcaaataaggagccatatgaaaatgctatctgtgagcagcagttgataatgtgcataaaatctgggaacaggccagatgtggatgacatcactgagtactgcccaagagaaattatcagtctcatgaagctctgctgggaagcgaatccggaagctcggccgacatttcctggcattgaagaaaaatttaggcctttttatttaagtcaattagaagaaagtgtagaagaggacgtgaagagtttaaagaaagagtattcaaacgaaaatgcagttgtgaagagaatgcagtctcttcaacttgattgtgtggcagtaccttcaagccggtcaaattcagccacagaacagcctggttcactgcacagttcccagggacttgggatgggtcctgtggaggagtcctggtttgctccttccctggagcacccacaagaagagaatgagcccagcctgcagagtaaactccaagacgaagccaactaccatctttatggcagccgcatggacaggcagacgaaacagcagcccagacagaatgtggcttacaacagagaggaggaaaggagacgcagggtctcccatgacccttttgcacagcaaagaccttacgagaattttcagaatacagagggaaaaggcactgcttattccagtgcagccagtcatggtaatgcagtgcaccagccctcagggctcaccagccaacctcaagtactgtatcagaacaatggattatatagctcacatggctttggaacaagaccactggatccaggaacagcaggtcccagagtttggtacaggccaattccaagtcatatgcctagtctgcataatatcccagtgcctgagaccaactatctaggaaatacacccaccatgccattcagctccttgccaccaacagatgaatctataaaatataccatatacaatagtactggcattcagattggagcctacaattatatggagattggtgggacgagttcatcactactagacagcacaaatacgaacttcaaagaagagccagctgctaagtaccaagctatctttgataataccactagtctgacggataaacacctggacccaatcagggaaaatctgggaaagcactggaaaaactgtgcccgtaaactgggcttcacacagtctcagattgatgaaattgaccatgactatgagcgagatggactgaaagaaaaggtttaccagatgctccaaaagtgggtgatgagggaaggcataaagggagccacggtggggaagctggcccaggcgctccaccagtgttccaggatcgaccttctgagcagcttgatttacgtcagccagaactaaccctggatgggctacggcagctgaagtggacgcctcacttagtggataaccccagaaagttggctgcctcagagcattcagaattctgtcctcactgataggggttctgtgtctgcagaaattttgtttcctgtacttcatagctggagaatggggaaagaaatctgcagcaaaggggtctcactctgttgccaggctggtctcaaacttctggactcaagtgatcctcccgcctcggccttccaaagtgctgggatatcaggcactgagccactgcgcccagccaacaatccgctctgaggaaagcgtaagcaggaagacctcttaatggcatagcaccaataaaaaaatgactcctagttgtgtttggaaagggagagaagagatgtctgaggaaggtcatgttctttcagcttatggcatttcctagagttttgttgaagcaagaagaaaaactcagagaatataaaatcaacttttaaaattgtgtgctctcttcttcacgtaggctcctgttaaaaacaaagtgcagtcagattctaagccctgttcagagacttcgtggatcacagctgcagctcaccgccacatcacaggatccgttaacgttaatacccaatactctgtcagccactgtaggctctaagaaccacgtgcagtcttcagcccattaaattatcgattattttttaatgaattgaatttatattgagtcttcaaattaactgaatggatttaaaggggtaccaaggaggggggaaacatcagaatttcccaggcagttgttgcaaggaattggtactaaccgtgactacaacaaaaattcttgattgacttttaaagttatttcctggcattctggtaccttcacccagcctgagtgccctggagagggaacaggaaatgctgatctctacccctgggtgagaccagaacctcagggctgatactgttgagtggcttcctcggtttactctgtgtactgtgaaagtattttcatattttttctgtgtgccagagtgaaaaaggacagcttctgagtgtggtaattgtgcctctagcacccagcctttcaaagcccacctgaaacctgggggtggatgaaagaactagaatagaagactgaagctgggtaggccgctcagtgtccactggcattttgctaaaccgacaaggaaggctgtgtgcttagctctccccagagggagggcgagaagggtgtggtgatggtcaatctggctgtcggaacagattctggtgtcttgggctgataacagtgttgttgattctgattgtgaatcccctcaactctagcagacacatacacacccctgaaatggggctgcagagcaggctgtctcagccttgccactgtcggcatctcggcctgggtaattctgttgtggggactgtcctgttccttgtaggatgtttagtagcatccctgcccccacctactagatgccaggggcactgttctccccagccccccgccccagttgtgacaatagtctctaaacattgtcaaatggtccaaggaaaggggaaaattgccccggttgagaagagcactgctgtaaagtaatgagcctcggctctcctgtctgcacctgtccggttactacttggccaccacgcagccttggctcctacagcccaaaagggagaatggagggaggctccaggctttgctggaggggcctgggtgagttctgtttgctccttgtaccaccatccaaatggtgttatcaaatctcttagattccaaagaggttgaataattaatgttcaaaggcaagagggcaaggcattttttaacactttttaaaataaaaatttataccacaa

SEQ ID NO: 1937 - DNA, 1940 bp, Homo sapiens
gcgggactgtagaggcgcctataagggaagttgttcagtcaactcggaaaaagggtaacaacccggaaagtagactcaccgtcttggtctagagactgacccctgcacagacagaccccttcccctctctgcgaaaggaccaagccccagaagtcactccatctcctacggctcgcaatttccagaggccccctggcaccttccagcctgatgtcgtgcgtcaagttatggcccagcggtgcccccgcccccttggtgtccatcgaggaactggagaaccaggagctcgtcggcaaaggcgggttcggcacagtgttccgggcgcaacataggaagtggggctacgatgtggcggtcaagatcgtaaactcgaaggcgatatccagggaggtcaaggccatggcaagtctggataacgaattcgtgctgcgcctagaaggggttatcgagaaggtgaactgggaccaagatcccaagccggctctggtgactaaattcatggagaacggctccttgtcggggctgctgcagtcccagtgccctcggccctggccgctcctttgccgcctgctgaaagaagtggtgcttgggatgttttacctgcacgaccagaacccggtgctcctgcaccgggacctcaagccatccaacgtcctgctggacccagagctgcacgtcaagctggcagattttggcctgtccacatttcagggaggctcacagtcagggacagggtccggggagccagggggcaccctgggctacttggccccagaactgtttgttaacgtaaaccggaaggcctccacagccagtgacgtctacagcttcgggatcctaatgtgggcagtgcttgctggaagagaagttgagttgccaaccgaaccatcactcgtgtacgaagcagtgtgcaacaggcagaaccggccttcattggctgagctgccccaagccgggcctgagactcccggcttagaaggactgaaggagctaatgcagctctgctggagcagtgagcccaaggacagaccctccttccaggaatgcctaccaaaaactgatgaagtcttccagatggtggagaacaatatgaatgctgctgtctccacggtaaaggatttcctgtctcagctcaggagcagcaataggagattttctatcccagagtcaggccaaggagggacagaaatggatggctttaggagaaccatagaaaaccagcactctcgtaatgatgtcatggtttctgagtggctaaacaaactgaatctagaggagcctcccagctctgttcctaaaaaatgcccgagccttaccaagaggagcagggcacaagaggagcaggttccacaagcctggacagcaggcacatcttcagattcgatggcccaacctccccagactccagagacctcaactttcagaaaccagatgcccagccctacctcaactggaacaccaagtcctggaccccgagggaatcagggggctgagagacaaggcatgaactggtcctgcaggaccccggagccaaatccagtaacagggcgaccgctcgttaacatatacaactgctctggggtgcaagttggagacaacaactacttgactatgcaacagacaactgccttgcccacatggggcttggcaccttcgggcaaggggaggggcttgcagcaccccccaccagtaggttcgcaagaaggccctaaagatcctgaagcctggagcaggccacagggttggtataatcatagcgggaaataaagcaccttccaagcttgcctccaagagttacgagttaaggaagagtgccaccccttgaggcccctgacttccttctagggcagtctggcctgcccacaaactgactttgtgacctgtcccccaggagtcaataaacatgatggaatgctagtcaaaaaaaaaaaaaaaaaaaa

SEQ ID NO: 1938 - DNA, 3797 bp, Homo sapiens
atgcccagcggcagctccgcggccctggccctggcggcggccccggcccccctgccgcagccgcccccgccgccgccgccgccaccgccgcctctgccgccgccctcgggcggcccggagctcgagggggacgggctcctgctgagggagcgcttggccgcgctaggcctcgacgaccccagcccggcggagcccggcgccccggcgcttcgggccccggcagcggcggcgcagggccaggcccggcgggcggcggagctgtctccagaggagcgggctccgcccggccggcccggggccccggaggcggccgagctggagctggaagaggacgaggaggagggggaggaagcggagctggacggagacctgctggaggaggaggagctggaggaagcagaggaggaggaccggtcgtcgctgctgctgctgtcgccgcccgcggccaccgcctctcagacccagcagatcccgggcgggtccctggggtctgtgctgctgccagccgccaggttcgatgcccgggaggcggcggccgcggcggcggcggcgggggtgctgtacggaggggacgatgcccagggcatgatggcggcgatgctgtcccacgcctacggccccggcggttgtggggcggcggcggccgccctgaacggggagcaggcggccctgctccggagaaagagcgtcaacaccaccgagtgcgtcccggtgcccagctccgagcacgtcgccgagatcgtcggccgccagggttgtaaaattaaagcactgagagccaagacaaacacgtatatcaagactcctgttcgtggtgaagagcccatttttgttgtcactggaaggaaagaagatgttgccatggccaaaagagagatcctctcagctgcagagcacttctccatgattcgtgcatctcgaaacaaaaatgggcctgccctgggaggattatcatgtagtcctaatctgcccggtcaaaccaccgtccaagtcagggtcccttatcgtgtggtaggattagtggttggacccaaaggagcaactattaaaagaattcagcagcagacccacacctacatagtaactccgagcagagataaggaacctgtctttgaagtgacagggatgcctgaaaatgttgaccgagcacgggaagaaatagaaatgcatattgccatgcgtacaggaaactatatagagctcaatgaagagaatgatttccattacaatggtaccgatgtaagctttgaaggtggcactcttggctctgcgtggctctcctccaatcctgttcctcctagccgcgcaagaatgatatccaattatcgaaatgatagttccagttctctaggaagtggctctacagattcctactttggaagcaataggctggctgactttagtccaacaagcccatttagcacaggaaacttctggtttggagatacactaccatctgtaggctcagaagacctagcagttgactctcctgcctttgactctttaccaacatctgctcaaactatctggactccatttgaaccagttaacccactctctggctttgggagtgatccttctggtaacatgaagactcagcgcagaggaagtcagccatctactcctcgtctgtctcctacatttcctgagagcatagaacatccacttgctcggagggttaggagcgacccacctagtacaggcaaccatgttggccttccaatatatatccctgctttttctaatggtaccaatagttactcctcttccaatggtggttccacctctagctcacctccagaatcaagacgaaagcacgactgtgtgatttgctttgagaatgaggttattgctgccctagttccatgtggccacaacctcttctgcatggaatgtgccaacaagatctgtgaaaagagaacgccatcatgtccagtttgccagacagctgttactcaggcaatccaaattcactcttaactatatatatatacataaatactatatctctatatggactcgtaaaggcatgggtataatggtaccccccagtaaacttcctaatgatttcttatgactgttatcaggctttattgggattaggctaaagttgttagtaaacttataaaaggctgctatggtaacactaaacctaagtggtctcttgtctattagtttggtttgaattattagtactatcctgtagacccagagacatagtttatataagaattgctaaagctgaagttcaacttggctgagtgaagataatcataggttgtgtgagcctatgaaaaagtgtatacgtctaagatttcaaaacaatgggtcccaaagcctaaccactttaagagtttatggagggtacttggcattacagacgattcatacacttccagtgctgccttctttacactgccagttttgacaaaacaggtttgttttttattttacaacaacatatgcctaattctgcaggattgcaagtaactttttaatgcattgtgattacttattggtaatgatagggctgatggcagtttactagatcactggttataatttgggacaaaaactgctacatcaactttcatctcgcccagagtgctcaaggctggtatgatcagtggatcaggaatgcaattgtgaattcctgcccattgcctctcttggtgaatgtggaaatggccacctgggttttcccatatcaggaagggctttgggatggcacctatattggctgataattgaggatgcaaacattccattcattagtgtgatcgagctgttaatttttagactatagatcaaaatgtgaaacattttatgttcaatccatatttgtcttgcacattataaatatatttttattttttagtaatttaggggagggaggagggagaaagggataatgatgcccttggcataattcacaaaagcagctgtgacaacctccaatcagtttacttcatttcaaaactatttccaatcacaaggaaagatttatttaaaatatactcgtacatttcacctgtggatgtctataacttcatcctcagtatgttcccaaatctgtgctggcattgaaaggacaaaacattatactagtgggtttttctactaattattttttgaagcattattttcccaacacaaaagagcttttttctcggtataatgaaaattgaaatcctatgtgtattcaatagtaaatagacaaattttattttttatttccacttgaagagttacatttcgtataaaagtttacaaataacggtttttattttgattttttcagtataaaaaaagttgccttgatggcatattatgatgtaatgctaattgcttgtaggatagtaaatggtcagtattgaaacctaatctctagctgccgtcttgtagatatgaacgaatgttcaccaagcatgtattttgtattttgttgcattgtacactgcaactaataagccaaggaatcgacatatattaggtgcgtgtactgtttctaaaaaccacaaactaagaatgataaattatcaatatagtttagtatttgctaattttactacactcttttgttatgtatatgtagggaagtcatagggattataaattcaatttgagtaaaatttaaaaccatatattttatgataaagggcctttaacttaagatggccaaagcactgatattatatatttgctgtaaagagaattataagagttttatttttctgatattaaaagttacttaataaagacttgtttccattaacttgaaaaaaaaaaaaaaaaaa

SEQ ID NO: 1939 - DNA, 3493 bp, Homo sapiens
ggctccggccgcggccgccgctgatacacggttgtggagggtacggccgcggtctccggaggtggcgggggtgttggggacgggtgctgcgaccggcactgcccatccgagcgggacgggcgctgagtggccgggaggcagccgggtagccgcctggaggagcagtctcggggcctattattggttttttccctccgagaccgattccatctgcagagaccgcgacgccccatcctgggccgggccgcagtgcccgcccgcctgagaggcgccgcccgccagccggcccgagcgaacctggagccgccgccgtgcccgccgctcttctcgcggagcctgggcggtcggcggggcctggggcctgggcttcgggcgcggcgttgcggcggccgctcctccccgcgcagaacacgctgggccccgggcctggcccggccgagcgccgcgccctcctgacccgcggccgcgggagtccggcccccacggcccctcgggccccggcctgccgcccggatccccgcctcctgggcggatctgagttattttttggtctccccctcccccttgagatcgcggcaccggagggccgaccccgccacctgggtcagtgcccgccccgggggaagcgtccctcgttttgttcttccccgcgagctctccccgcgcccctctcctttctgtgcttaatggatgggggttttgagtttttcccctttatttttgtcggctcttgactgggaggcccggcgcgaggctctgcgtctctgcgtccctcgtcgccgcctcgcgcccgcgcggatcccgtcacctgcttccccgccggggatggccggccagtgacggcgccgggtggcccgcgcgtggacacggggccctcgcccaagctgccaccgagccgcggcccccgccctcgacccttctctctcccgtattccgagctctctggaaagagaggaaactccagggaagatgtggctgaagctttttttcttgctcctctatttcctggtcctgttcgtcctggccaggttttttgaggccattgtgtggtatgaaactggcatctttgccacccagctggtggatccggtggcgctgagcttcaagaagctgaagaccattttggagtgccgggggttgggctactcagggttgcccgagaagaaggatgtccgggagctggtggaaaagtcaggtgacttgatggagggtgagctctattctgctctcaaggaagaagaagcatccgaatcggtttctagtaccaatttcagtggtgaaatgcacttctatgagcttgtggaagacacaaaagatggcatctggctggttcaggtcatagcaaatgacagaagtcccttggtgggcaaaattcactgggagaaaatggttaaaaaggtgtcaagatttggaatacgtacaggcacatttaactgttccagtgatcccagatattgcaggagaagaggctgggtccgatccacactcattatgtctgttccacaaacaagtacttcaaaagggaaagtcatgcttaaagaatacagtggacgcaagattgaagtagagcacatttttaaatggataactgctcatgcagcttctcggatcaaaaccatttataatgctgaacacttgaaagaagaatggaataaaagtgatcagtattggttaaaaatatacctatttgcaaaccttgaccagcccccagctttcttctctgcactaagtataaagtttactggaagagttgagtttatttttgttaatgtagaaaattgggacaacaagagttatatgacagatattggcatatataatatgccatcatacatacttagaactcctgaaggaatttacaggtatggaaaccacacaggcgaatttatatcccttcaggccatggattcatttttgcgctcattacaacccgaggtaaatgatctgtttgttttgagcttggttctagttaatcttatggcttggatggacttatttattacacaaggagctaccataaagcgatttgtggttctcataagcactttagggacatataattctctattaattatttcctggctacctgtgttgggctttttacagctaccttacttagatagcttttatgaatatagcttaaaattgttgagatattccaatacaaccacactggcttcatgggtaagggcagactggatgttttactcttcacacccagccctgtttctcagtacataccttggtcatggtttactaattgattactttgagaagaagagaaggcgcaacaacaacaatgatgaagtcaatgccaataacttagaatggttatcaagtctgtgggactggtacaccagctacctcttccacccgattgcttcttttcagaactttcctgtagaatctgattgggacgaagaccctgacttattcttggagcgcttagctttccctgacctttggcttcaccctctgataccaactgattatattaaaaacttaccaatgtggcgatttaaatgtcttggagtccagtctgaagaggaaatgtcggaggggtctcaagatactgaaaatgactcggaaagtgagaacacagacactttgagtagtgagaaggaagtatttgaagataagcaaagcgtacttcacaattctccaggaacagcaagtcactgtgatgctgaggcttgttcatgtgccaataaatattgtcagaccagcccatgtgaaaggaaggggaggtcatatggatcatataacactaatgaagatatggaacctgattggttaacttggcctgctgatatgctgcactgtactgaatgtgttgtttgcctagagaattttgaaaatggatgtttgctaatggggttgccttgtggtcatgtgtttcatcagaattgcattgtgatgtggttggctgggggccgacattgttgccctgtttgccggtggccttcttataaaaaaaagcagccatatgcacaacaccagcccttgtcaaatgatgtcccatcttaaccatgtgcaatttgtcctttataagctttgagtatcttacagcttgcctttttaatgttagtcacaatgtttttgtggtttgaagtttagtttaatgttagtgcagtgacgggaaatacacattatgctaatgttgatgacagaatttatttggttgccttgtgtgttaattgaatgcatacctaattgtaaaatttttttatttacaacattggaaattcagaagttaatgtttttttgtaagcacaaaagaagtattatagaaatttatcctagcaagactttacaagataggatcaaattctaatggaattgagccggtttcttatcctaaatgtttcctccctttttacaatctctgtccagcacctcttggttaaataatgtatgctgtgagacatgaaattaaaacagacctatgaaataaattattttaaaaccagaagattaaaaaaaaaaaaaaaaa

SEQ ID NO: 1940 - DNA, 1865 bp, Homo sapiens
cgcgagagggactttgtgttccgctgaccctcctcggggcgcttcctcccgtgccgcccttcccctcccccgccgcgtccttgcgaggcgcctcccattcggtgggaccgacccggggggatggagggggcacgcttctacaaccctcctgggaccccgaagagacgcccgcgtgcgacctgagacgccgccctcgccgagggcccatgggcgcgtccccacaggcgggcagtggacgtgagggcggcgagcggcggggccgcggcgtccaggagggccgcgctcgggctcggccccgcgcaggccgcgcgcgcgcgctcccgccgccgcccgggccgcgcccgccccgcctctaggcgccggccccggagcccggtccgcgagcagcggcggctgccggagggacgatgagctgcgcggggcgggcgggccctgcccggctcgccgcgctcgccctgctgacctgcagcctgtggccggcacgggcagacaacgcgagccaggagtactacacggcgctcatcaacgtgacggtgcaggagcccggccgcggcgccccgctcacgtttcgcatcgaccgcgggcgctacgggcttgactcccccaaggccgaggtccgcggccaggtgctggcgccgctgcccctccacggagttgctgatcatctgggctgtgatccacaaacccggttctttgtccctcctaatatcaaacagtggattgccttgctgcagaggggaaactgcacgtttaaagagaaaatatcacgggccgctttccacaatgcagttgctgtagtcatctacaataataaatccaaagaggagccagttaccatgactcatccaggcactggagatattattgctgtcatgataacagaattgaggggtaaggatattttgagttatctggagaaaaacatctctgtacaaatgacaatagctgttggaactcgaatgccaccgaagaacttcagccgtggctctctagtcttcgtgtcaatatcctttattgttttgatgattatttcttcagcatggctcatattctacttcattcagaagatcaggtacacaaatgcacgcgacaggaaccagcgtcgtctcggagatgcagccaagaaagccatcagtaaattgacaaccaggacagtaaagaagggtgacaaggaaactgacccagactttgatcattgtgcagtctgcatagagagctataagcagaatgatgtcgtccgaattctcccctgcaagcatgttttccacaaatcctgcgtggatccctggcttagtgaacattgtacctgtcctatgtgcaaacttaatatattgaaggccctgggaattgtgccgaatttgccatgtactgataacgtagcattcgatatggaaaggctcaccagaacccaagctgttaaccgaagatcagccctcggcgacctcgccggcgacaactcccttggccttgagccacttcgaacttcggggatctcacctcttcctcaggatggggagctcactccgagaacaggagaaatcaacattgcagtaacaaaagaatggtttattattgccagttttggcctcctcagtgccctcacactctgctacatgatcatcagagccacagctagcttgaatgctaatgaggtagaatggttttgaagaagaaaaaacctgctttctgactgattttgccttgaaggaaaaaagaacctatttttgtgcatcatttaccaatcatgccacacaagcatttatttttagtacattttattttttcataaaattgctaatgccaaagctttgtattaaaagaaataaataataaaataaaaagtctgtaaaaaaaaaaaaaaaaaa

SEQ ID NO: 1941 - DNA, 2430 bp, Homo sapiens
cccggccggtgagcaacggctctgcggccatggcgagcggcgagcattcccccggcagcggcgcggcccggcggccgctgcactccgcgcaggctgtggacgtggcctcggcctccaacttccgggcctttgagctgctgcacttgcacctggacctgcgggctgagttcgggcctccagggcccggcgcagggagccgggggctgagcggcaccgcggtcctggacctgcgctgcctggagcccgagggcgccgccgagctgcggctggactcgcacccgtgcctggaggtgacggcggcggcgctgcggcgggagcggcccggctcggaggagccgcctgcggagcccgtgagcttctacacgcagcccttctcgcactatggccaggccctgtgcgtgtccttcccgcagccctgccgcgccgccgagcgcctccaggtgctgctcacctaccgcgtcggggagggacccggggtttgctggttggctcccgagcagacagcaggaaagaagaagcccttcgtgtacacccagggccaggctgtcctaaaccgggccttcttcccttgcttcgacacgcctgctgttaaatacaagtattcagctcttattgaggtcccagatggcttcacagctgtgatgagtgctagcacctgggagaagagaggtccaaataagttcttcttccagatgtgtcagcccatcccctcctatctgatagctttggccatcggagatctggtttcggctgaagttggacccaggagccgggtgtgggctgagccctgcctgattgatgctgccaaggaggagtacaacggggtgatagaagaatttttggcaacaggagagaagctttttggaccttatgtttggggaaggtatgacttgctcttcatgccaccgtcctttccatttggaggaatggagaacccttgtctgacctttgtcaccccctgcctgctagctggggaccgctccttggcagatgtcatcatccatgagatctcccacagttggtttgggaacctggtcaccaacgccaactggggtgaattctggctcaatgaaggtttcaccatgtacgcccagaggaggatctccaccatcctctttggcgctgcgtacacctgcttggaggctgcaacggggcgggctctgctgcgtcagcacatggacatcactggagaggaaaacccactcaacaagctccgcgtgaagattgaaccaggcgttgacccggacgacacctataatgagaccccctacgagaaaggtttctgctttgtctcatacctggcccacttggtgggtgatcaggatcagtttgacagttttctcaaggcctatgtgcatgaattcaaattccgaagcatcttagccgatgactttctggacttctacttggaatatttccctgagcttaagaaaaagagagtggatatcattccaggttttgagtttgatcgatggctgaatacccccggctggcccccgtacctccctgatctctcccctggggactcactcatgaagcctgctgaagagctagcccaactgtgggcagccgaggagctggacatgaaggccattgaagccgtggccatctctccctggaagacctaccagctggtctacttcctggataagatcctccagaaatcccctctccctcctgggaatgtgaaaaaacttggagacacatacccaagtatctcaaatgcccggaatgcagagctccggctgcgatggggccaaatcgtccttaagaacgaccaccaggaagatttctggaaagtgaaggagttcctgcataaccaggggaagcagaagtatacacttccgctgtaccacgcaatgatgggtggcagtgaggtggcccagaccctcgccaaggagacttttgcatccaccgcctcccagctccacagcaatgttgtcaactatgtccagcagatcgtggcacccaagggcagttagaggctcgtgtgcatggcccctgcctcttcaggctctccaggctttcagaataattgtttgttcccaaattcctgttccctgatcaacttcctggagtttatatcccctcaggataatctattctctagcttaggtatctgtgactcttgggcctctgctctggtgggaacttacttctctatagcccactgagccccgagacagagaacctgcccacagctctccccgctacaggctgcaggcactgcagggcagcgggtattctcctccccacctaagtctctgggaagaagtggagaggactgatgctcttcttttttctctttctgtcctttttcttgctgattttatgcaaagggctggcattctgattgttcttttttcaggtttaatccttattttaataaagttttcaagcaaaaattaagttaaaaaaaaaaaaaaaaaa

SEQ ID NO: 1942 - DNA, 2038 bp, Homo sapiens
ggcccgcgggactcagaccagcggggagcgcggcctccgcccttggggccctcccgccgggccggagacccaagcccccaacgccaggccctgccctggaagcgctcgcggcccggcgcctggacgggggagttgctgctctttggcgtaaattgcaatcgattagggatcgtttctcagaatcaagttagaagtgagagttcagataagtgaggccgccattgctgctttgaacacctcagaaggggagaatggatttatcaggagtgaaaaagaagagcttgctaggagtcaaagaaaataataaaaagtccagcactagggctccttcacctaccaaacgcaaagaccgctcagatgagaagtccaaggatcgctcaaaagataaaggggccaccaaggagtcgagtgagaaggatcgcggccgggacaaaacccgaaagaggcgcagcgcttccagtggtagcagcagtaccaggtctcggtccagctcgacttccagctcaggctccagcaccagcactggctcaagcagtggctccagctcttcctcagcatccagccgctcaggaagctccagcacctcccgcagctccagctctagcagctcttctggctctccaagtccttctcggcgcagacacgacaacaggaggcgctcccgctccaaatccaaaccacctaaaagagatgaaaaggagaggaaaaggcggagcccatctcctaagcccaccaaagtgcacattgggagactcacccggaatgtgacaaaggatcacatcatggagatattttccacctatgggaaaattaaaatgattgacatgcccgtggaaaggatgcatccccatctgtccaaaggctatgcgtacgtagagtttgagaatccagatgaagccgagaaggcgctgaagcacatggatggaggacaaattgatggccaggagatcactgccaccgccgtgctggccccctggcctaggccaccccccaggagattcagccctcccaggagaatgttgccaccaccgcctatgtggcgcaggtctcccccacggatgaggagaaggtcccgctccccgaggcgcaggtcccccgtgcgccggagatcacggtccccgggccgccgccgccacaggagccgctccagctccaactcctcccgataaacaggccactgaagctctcgcccctgtaacttataccccacccagctcagttttgtcacttttctagccaaaggaagaccagtaggaaagcaaacccttgactctggcaggatttgcaggcagcaggcagcacccctctgccagccgggccccggctgcagaagtgctgttggtttggatgctgtgtgcctgtcaagattccctccggttttctggctagaaagctcatccgtttccggtttctaagagtcagttcagtggcagagccaccagggaaaagtgaggctcttgggggtggtttgaccctgcttacctgggagcacacttttcccttccccgatgacctgggatggtggccaggccgtgcccttgctgttgctgggcagtgtccttttggaaagggagctgccccaggctttagtgcagctgccaaccctgttaggcctggcctctcgaggcctcttctgacctcaagggtcacaccccctcaaagatcctctcacccatggtagttgctgctcgtggttctgtctgtccgtgcaccgatgcacacaccgcaccccaccactgtactctgaaattggcgagtgagtggagagccagctctgcggagtcatcacgcagccatggttgtgcctgccgttcatggtggtctttcaggttatcttggcaacatgtacattgcttttattttttttcttttttgctttcattgtacagtcagtactataaaatttctcttttgagttttatacctttgtagcattttagatgacattgtgtttgtactttgttgtgtagagtggaagaattgtgttgaataaacccaagatcggaatgcaaaaaaaaaaaaaaaaaaaaaaaaaaaa

SEQ ID NO: 1943 - DNA, 1963 bp, Homo sapiens
gagcggcgccggcctcggcggctgaggaaagcaggaggaggtggcggcggcgggaagatgctgctctttggcgtaaattgcaatcgattagggatcgtttctcagaatcaagttagaagtgagagttcagataagtgaggccgccattgctgctttgaacacctcagaaggggagaatggatttatcaggagtgaaaaagaagagcttgctaggagtcaaagaaaataataaaaagtccagcactagggctccttcacctaccaaacgcaaagaccgctcagatgagaagtccaaggatcgctcaaaagataaaggggccaccaaggagtcgagtgagaaggatcgcggccgggacaaaacccgaaagaggcgcagcgcttccagtggtagcagcagtaccaggtctcggtccagctcgacttccagctcaggctccagcaccagcactggctcaagcagtggctccagctcttcctcagcatccagccgctcaggaagctccagcacctcccgcagctccagctctagcagctcttctggctctccaagtccttctcggcgcagacacgacaacaggaggcgctcccgctccaaatccaaaccacctaaaagagatgaaaaggagaggaaaaggcggagcccatctcctaagcccaccaaagtgcacattgggagactcacccggaatgtgacaaaggatcacatcatggagatattttccacctatgggaaaattaaaatgattgacatgcccgtggaaaggatgcatccccatctgtccaaaggctatgcgtacgtagagtttgagaatccagatgaagccgagaaggcgctgaagcacatggatggaggacaaattgatggccaggagatcactgccaccgccgtgctggccccctggcctaggccaccccccaggagattcagccctcccaggagaatgttgccaccaccgcctatgtggcgcaggtctcccccacggatgaggagaaggtcccgctccccgaggcgcaggtcccccgtgcgccggagatcacggtccccgggccgccgccgccacaggagccgctccagctccaactcctcccgataaacaggccactgaagctctcgcccctgtaacttataccccacccagctcagttttgtcacttttctagccaaaggaagaccagtaggaaagcaaacccttgactctggcaggatttgcaggcagcaggcagcacccctctgccagccgggccccggctgcagaagtgctgttggtttggatgctgtgtgcctgtcaagattccctccggttttctggctagaaagctcatccgtttccggtttctaagagtcagttcagtggcagagccaccagggaaaagtgaggctcttgggggtggtttgaccctgcttacctgggagcacacttttcccttccccgatgacctgggatggtggccaggccgtgcccttgctgttgctgggcagtgtccttttggaaagggagctgccccaggctttagtgcagctgccaaccctgttaggcctggcctctcgaggcctcttctgacctcaagggtcacaccccctcaaagatcctctcacccatggtagttgctgctcgtggttctgtctgtccgtgcaccgatgcacacaccgcaccccaccactgtactctgaaattggcgagtgagtggagagccagctctgcggagtcatcacgcagccatggttgtgcctgccgttcatggtggtctttcaggttatcttggcaacatgtacattgcttttattttttttcttttttgctttcattgtacagtcagtactataaaatttctcttttgagttttatacctttgtagcattttagatgacattgtgtttgtactttgttgtgtagagtggaagaattgtgttgaataaacccaagatcggaatgcaaaaaaaaaaaaaaaaaaaaaaaaaaaa

SEQ ID NO: 1944 - DNA, 4512 bp, Homo sapiens
actataaaataataatgaaatcttggaatagataagttactctatgaggactgaagctgttgttaattcccaaggccagactgattatctcacaaaggattcagaccaggatgtagcactcaaacttgcccaggagcgagctgaaatagttgctaaatatgacagaggacgagaaggtgcagagattgaaccttgggaagatgctgattaccttgtttacaaagtcacagatagatttggctttttacatgaggaggagctcccagatcataatgtggctgtggaacggcaaaagcacctggaaattgaaagaactaccaaatggctgaaaatgctgaaaggatgggaaaaatacaagaacactgaaaagtttcataggcgaatttacaaaggaataccactccagctcagaggtgaagtctgggccctccttcttgagatccctaaaatgaaagaagaaacaagggacctgtatagtaaattaaaacacagagcacggggctgttcacctgacatcagacaaatagacctggatgtcaaccgcacatttcgggaccacattatgtttagagacagatatggtgttaagcaacaatccttattccatgtgcttgctgcctattctatttataacacggaagtcgggtattgtcaggggatgagccagatcacagctttactcctcatgtatatgaacgaggaagatgccttctgggccctggtcaaactcttctcaggccctaaacatgccatgcatggcttttttgtccaaggttttcctaaactcttgaggtttcaagaacatcatgaaaaaatactgaacaaatttctgtccaagcttaagcaacacttggattctcaagaaatctacacaagtttttacacaatgaaatggttttttcagtgtttccttgatcgtactccctttacactaaacctcagaatatgggatatctacatctttgaaggagaacgagttcttactgctatgtcttacaccatcttaaaattacacaaaaaacatctaatgaaattgtccatggaagaacttgtagaattttttcaggagaccctggcaaaggattttttctttgaagatgattttgtgatagagcaacttcagatttctatgacagaactaaagcgggcaaagttagaccttccagaacctggtaaagaggatgaatatccaaagaagcccttggggcagcttccacctgaacttcagtcttggggcgtccatcacttgagcaacggacagaggagcgtgggccggccgagcccgctggccagcggcaggagggagagcggggcgccccacaggaggcacgagcactccccgcacccccagagcaggaccgggacgcccgagagagcacagccgccaagacggaaatcggtggaggaggagagcaaaaagcttaaagatgaggcagattttcaaagaaaactcccatcgggtccacaggacagttccaggcaatataatcacgcagctgccaaccaaaatagcaacgccacttcaaatatcaggaaggagtttgtgcccaaatggaataaaccgtcagacgtctcagctacagagagaactgccaaatacaccatggaaggcaaaggtcgagcagcgcaccccgcgctcgcagttaccgtcccaggtcctgccgaggtgcgggtgtcaaacgtgcggccaaagatgaaggccctggatgctgaggacgggaagcggggctccactgcatcgcagtacgacaacgtgccaggcccggagctggacagcggcgcttccgtggaggaggcgctggaaagggcttactcccagagcccccggcatgccctttaccctcctagcccgagaaagcacgctgagccaagttctagtccatcaaaagtatccaacaagtttacttttaaagtacagcctccaagtcatgcacgatatccgtcccagctagatggggaagcccgagggctagctcatcccccctcctacagcaatccccccgtttaccacggaaactctcccaaacacttccctactgccaacagcagctttgcttctccacagtttagccctgggactcaactgaatccttccaggagacctcatggttctactctttccgtcagtgcttctccggagaaatcttacagccgcccaagcccccttgtactgccgtctagtcgaatagaagtcctccctgttgacactggtgctgggggatattcgggcaattcagggtcaccaaagaatggaaaattgatcattccaccagtggattacttgccagataacagaacatggtcagaagttagttatacatacagacctgagacgcagggacaatcatggacccgagatgctagccgtggcaatttaccaaaatactcagcctttcaactcgcaccctttcaggaccatggcctccctgcagtttctgtagatagtcccgtgagatataaagcttcaccggccgcagaagatgccagtccatctggatatccatattcagggcccccgcctccagcctaccactacaggaatcgggacgggctttccatccaagagtcagtgttgctgtgagatttgacgtgtacttgctaaagacgagagagaaaccacgtgaaacctacattgctatgttcataattgccaaagcagtatttatactattgtaaacaactcgcacatctctcctgtctgttagtagtaagaatacagggaaatgtcttcagccccacgtagatgctgcttaagatgagcgtttcaattgcatcatcactgacctgttagaatttaacccggaaacatcgcaatagcatttagggatgcacgcacagtggtaatttattactcagttccggttatgtttttctccaaaacctgaacatttttactctgttggctcattctattttgactaatgttacaaagtactgaaaaaactgtagaatagatatttttaaggctatatgtagtgtatgtgtcttttaatagatataggcatctgttcatccacatttgaacacagagctaaagaaacgttttttaaaaaactacttttaatccagatccatggaataatatgtaattcttgttttccttgtcttttagtccagtttttctttttccctctcatatatttgtaacctgggtcctaaactgactgaagagtttgtcctgactttattaattgcagtctcacagaatgctcatcattctccttcagctgttgccattttctttcaatctgaaaattaaagacattggagagaaaggctaaccacttaatggtgcttaaaaatcggggcacttaaaataagtttacggccaaaggtgcagcagtgcttatcacatccacatactaagagattggtcttagtgcgtttgtgccctttgttctggtctgactcttgcgaatctcagagcaggagaagttgcagcttactgatccctcagtgctcacagtactcatgtggggcagccacactaactgcattagcagtgtggttacttctttcttctgcctcgactcacatggcttctccccacgaaggtcccagggtggccatttatacaatccatttctgtcctctttatggaatgtagtcgacggatattgctgcacctcatcaggccattacattgtccatgttaaaattataaaaatgatcctagtttttcataggagtctaggattttgatcttttaaaaaatacagtgtgatttcatgcttttgaacatctttttttcattgaaacaaattcaagttcttggcttaaaaaaaaattagtgatgtctttaaaaaatattctgttacactacagataccaaaacactgacaaagatttaggcactccaagagagtatgacttcgtgtttaattggggagcttgttttcaacattgcttatatttgaatagtagaaaacccgacattgatgtttcttcctgttgcaaggtggggctttaaactttcaaggtacaaaagtatgtcttttaaaatggaagtaacgtttgtttagctagtgaatgtgacaatatattttatgtatataatgagtctaatgtaattttgatcaacttggtaatgatgttattaaatagcaaaacaagtgcagtgtattaaagctaaacactacattgaaacgcaaacaaaattctggtgaaataactgggctgttgatgcaggtcaggtggaagctgagaaataaatgtatataaatatgtagctgaggatattaattcccattatataaccataattctgtgacttgtaataaaccaagctgtacaatttagtttataatagcagtatctgagctgctccaaaatatatatatcaacagtggtaaatactgtagatttttatatatatatatatatatatatatatatatgcaaaaaatatatatatacacacaagcactattttcttatgtcatttatgacattttttatctgtatacttttttgatgtgattgttttttaacatgctaaaagtaataagtata

SEQ ID NO: 1945 - DNA, 978 bp, Homo sapiens
caaaacaccaaatggcggatgacgccggtgcagcgggggggcccgggggccctggtggccctgggatggggaaccgcggtggcttccgcggaggtttcggcagtggcatccggggccggggtcgcggccgtggacggggccggggccgaggccgcggagctcgcggaggcaaggccgaggataaggagtggatgcccgtcaccaagttgggccgcttggtcaaggacatgaagatcaagtccctggaggagatctatctcttctccctgcccattaaggaatcagagatcattgatttcttcctgggggcctctctcaaggatgaggttttgaagattatgccagtgcagaagcagacccgtgccggccagcgcaccaggttcaaggcatttgttgctatcggggactacaatggccacgtcggtctgggtgttaagtgctccaaggaggtggccaccgccatccgtggggccatcatcctggccaagctctccatcgtccccgtgcgcagaggctactgggggaacaagatcggcaagccccacactgtcccttgcaaggtgacaggccgctgcggctctgtgctggtacgcctcatccctgcacccaggggcactggcatcgtctccgcacctgtgcctaagaagctgctcatgatggctggtatcgatgactgctacacctcagcccggggctgcactgccaccctgggcaacttcgccaaggccacctttgatgccatttctaagacctacagctacctgacccccgacctctggaaggagactgtattcaccaagtctccctatcaggagttcactgaccacctcgtcaagacccacaccagagtctccgtgcagcggactcaggctccagctgtggctacaacatagggtttttatacaagaaaaataaagtgaattaagcgtgaaaaaaaaaaaaaaaaaaaaaaaaaaaaaaaaaaaaaaaaaaaaaaaa

SEQ ID NO: 1946 - DNA, 6235 bp, Homo sapiens
ctcctctcttttggaaaccggagaggtggagggagggcaacaccgctgcaaaggagaggcccgccaagtctgcccgcctgcaaagtgttgctttgacacattcttattatggaagttaagtaaaaatatagacatattaaaaaataactccggacgtggagctgctacggagaaggaaaccgggggaaagaaaaccagtaggcaggccaatggtttttcggcagcgcgctggcaagtttgtggaacactttctaggaattaggtcttttcctcccccttcatcatcttgacttctgaaggaagaacttggctttggattgcagtggagcctaaggagagagggttagacacactcgaataatccctctggctgggctgaatttgtgggaatttaggaagccagagtgctggaaatacagcagcctttgaagtaccctctgttaatttggatggatctcagtgtgccccgttcgagacctctccaccaaccccttctgatcttgcgatttgctcttcttgactttaattagtatctaggaaagtctaaactttggacctacctctttttttgatactcatttttgtacttttgctctctgggattggtttcttaaagaatctggatcctttttaatatgtcaaaatgagtctgctgatgtttacacaactactgctctgtggatttttatatgttcgggttgatggatcgcgtcttcgccaggaggactttcccccgcggattgtggagcatccttccgatgtcatcgtctctaagggcgagcccacgactctgaactgcaaggcggagggccggccaacgcccaccattgagtggtacaaagatggggagcgagtggagactgacaaggacgatccccggtcccacaggatgcttctgcccagcggatccttattcttcttgcgcatcgtgcacgggcgcaggagtaaacctgatgaaggaagctacgtttgtgttgcgaggaactatcttggtgaagcagtgagtcgaaatgcgtctctggaagtggcattgttacgagatgacttccgacaaaaccccacagatgttgtagtggcagctggagagcctgcaatcctggagtgccagcctccccggggacacccagaacccaccatctactggaaaaaagacaaagttcgaattgatgacaaggaagaaagaataagtatccgtggtggaaaactgatgatctccaataccaggaaaagtgatgcagggatgtatacttgtgttggtaccaatatggtgggagaaagggacagtgacccagcagagctgactgtctttgaacgacccacatttctcaggaggccaattaaccaggtggtactggaggaagaagctgtagaatttcgttgtcaagtccaaggagatcctcaaccaactgtgaggtggaaaaaggatgatgcagacttgccaagaggaaggtatgacatcaaagacgattacacactaagaattaaaaagaccatgagtacagatgaaggcacctatatgtgtattgctgagaatcgggttggaaaaatggaagcctctgctacactcaccgtccgagctcccccacagtttgtggttcggccaagagatcagattgttgctcaaggtcgaacagtgacatttccctgtgaaactaaaggaaacccacagccagctgttttttggcagaaagaaggcagccagaacctacttttcccaaaccaaccccagcagcccaacagtagatgctcagtgtcaccaactggagacctcacaatcaccaacattcaacgttccgacgcgggttactacatctgccaggctttaactgtggcaggaagcattttagcaaaagctcaactggaggttactgatgttttgacagatagacctccacctataattctacaaggcccagccaaccaaacgctggcagtggatggtacagcgttactgaaatgtaaagccactggtgatcctcttcctgtaattagctggttaaaggagggatttacttttccgggtagagatccaagagcaacaattcaagagcaaggcacactgcagattaagaatttacggatttctgatactggcacttatacttgtgtggctacaagttcaagtggagagacttcctggagtgcagtgctggatgtgacagagtctggagcaacaatcagtaaaaactatgatttaagtgacctgccagggccaccatccaaaccgcaggtcactgatgttactaagaacagtgtcaccttgtcctggcagccaggtacccctggaacccttccagcaagtgcatatatcattgaggctttcagccaatcagtgagcaacagctggcagaccgtggcaaaccatgtaaagaccaccctctatactgtaagaggactgcggcccaatacaatctacttattcatggtcagagcgatcaacccccaaggtctcagtgacccaagtcccatgtcagatcctgtgcgcacacaagatatcagcccaccagcacaaggagtggaccacaggcaagtgcagaaagagctaggagatgtccttgtccgtcttcataatccagttgtgctgactcccaccacggttcaggtcacatggacggttgatcgccaaccccagtttatccaaggctaccgagtgatgtatcgtcagacttcaggtctgcaggcgacatcttcgtggcagaatttagatgccaaagtcccgactgaacgaagtgctgtcttagtcaacctgaaaaagggggtgacttatgaaattaaagtacggccatattttaatgagttccaaggaatggatagtgaatctaaaacggttcgtactactgaagaagccccaagtgccccaccacagtctgtcactgtactgacagttggaagctacaatagcacaagtattagtgtttcctgggatcctcctcctccagatcaccagaatggaattatccaagaatacaagatctggtgtctaggaaatgaaacgcgattccatatcaacaaaactgtggatgcagccattcggtccgtaataattggtggattattcccaggtattcaataccgggtagaggttgcagctagtaccagtgcaggggttggagtaaagagtgagccacagccaataataatcgggagacgcaatgaagttgtcattactgaaaacaataacagcataactgagcaaatcactgatgtggtgaagcaaccagcctttatagctggtattggtggtgcctgctgggtaattctgatgggttttagcatatggttgtattggcgaagaaagaagaggaagggactcagtaattatgctgttacgtttcaaagaggagatggaggactaatgagcaatggaagccgtccaggtcttctcaatgctggtgatcccagctatccatggcttgctgattcttggccagccacgagcttgccagtaaataatagcaacagtggcccaaatgagattggaaattttggccgtggagatgtgctgccaccagttccaggccaaggggataaaacagcaacgatgctctcagatggagccatttatagtagcattgacttcactaccaaaaccagttacaacagttccagccaaataacacaggctaccccatatgccacgacacagatcttgcattccaacagcatacatgaattggctgtcgatctgcctgatccacaatggaaaagctcaattcagcaaaaaacagatctgatgggatttggttattctctacctgatcagaacaaaggtaacaatggtgggaaaggtggaaaaaagaagaaaaataaaaactcttctaaaccacagaaaaacaatggatccacttgggccaatgtccctctacctccccccccagtccagccccttcctggcacggagctggaacactatgcagtggaacaacaagaaaatggctatgacagtgatagctggtgcccaccattgccagtacaaacttacttacaccaaggtctggaagatgaactggaagaagatgatgatagggtcccaacacctcctgttcgaggcgtggcttcttctcctgctatctcctttggacagcagtccactgcaactcttactccatccccacgggaagagatgcaacccatgctgcaggctcacctggatgagttgacaagagcctatcagtttgatatagcaaaacaaacatggcacattcaaagcaataatcaacctccacagcctccagttccaccgttaggttatgtgtctggagccttgatttctgatttggaaacggatgttgcagatgatgatgccgacgacgaagaggaagctttagaaatccccaggcccctgagagcactggaccagactcctggatccagcatggacaatctagacagctctgtgacaggaaaagcctttacctcctctcaaagacctcgacctaccagcccattttctactgacagtaacaccagtgcagccctgagtcaaagtcagaggcctcggcccactaaaaaacacaagggagggcggatggaccaacaaccagcattgcctcatcgaagggaaggaatgacagatgaggaggccttggtgccctatagcaagcccagtttcccatctccaggtggccacagctcatcaggaacagcttcttctaagggatccactggacctaggaaaaccgaggtgttgagagcaggccaccagcgcaatgccagcgaccttcttgacataggatatatgggctccaacagtcaaggacagtttacaggtgaattatagtaaatgagaggagacatacaaagctgctctgaaggaccatcaggtccggactcatggaagtgatgactctaaacagtgcaatgaacaatttatttatgtactattaaaagaactgtaaatgcaatgtaaagacacacagccacacatatcccacagatattttcattgtgttcttctcttaagtacaccacccaccttaactctttcttgtcaggagtatataaaaaagaaagaaaacaaaactcgccctacaggaagaaaaggattctcctctgtatataatttcttttgtgcattgctatgcaagctcactctttttagctctgctcatattattgtctgttcttattggtctgttgtactatatgtgaattaataggctgtggtgccatatattaacttttaattgtgtaacttttatgtttaaattttgcactgcaattttatttggtgataagcacaaatctctactcctcatgacatgaagaaaaagactgaatgtgaagggagtttctgtactgtaagctagattggataatgatggctgtaacaaatcatgttagatggttttcagttggggtgtagaaataggaagatgcaaaggaacaatggtgttggcaaagtcttctttgaatatcagggactgagtcaataaaaaaaatagtagaaaggtggcttttactattgacaaaagccggggtcaaaaaaagtagtttaagtcttaagactgaatatgcattaaagtatgcaggtagcaaagatgtaataaatttgcttaaaaaaagaaattaaagttttatttagaatcaattttacctgtcattgtaattgacccatctgagaattacaataagcaagaggaaattaaggtgttttgcaagagctgtatttatattacagttttttaaaaacattttctgaattatcgtaattaagctctccaactcgttaagtcagaatataatatgaagttccccaaggaaacgaacaaaatgaactctagaatatctagcaaatagttaaagaagcaatttattattagggcatactcgggctgtttccaaatataaactctattgcaatatcttatttcatctttctaatacatgtacagtgcacactagaggatagagctgcatcacttaaattcatgacttaaaaaataatacagtttatatacaacttgttttttatttgattaagaagtgaagtttacgccacccaatgtatagccaaattgtacgtgcttaaaaaacagtgccgagagtatgttcagttcgcagtaagtagatttattggaataaatattctatggtacattctcagaaattggcttccaactaaaatacgtttgacccattttgaataaggaaattgaaaagaaaaatttaaaaggagaaaaaaatgcatgtttataaactttttaaataaaaccagaccttgtaagtggacatt

SEQ ID NO: 1947 - DNA, 6650 bp, Homo sapiens
gctggttccccttccgagcgtccgcgccccgcatgcgcagtctgccccggcggtctccgtttgtttgaacaggaaggcggacatattagtccctctcagcccccctcgccccaccccccaggcattcgccgccgcgactcgccctttccccggctgggaccgcagcccctcccagaagctcccccatcagcagccgccgggacccaactatcgtcttcctcttcgcccgctctccagcctttcctctgctaagtctccatcgggcatcgacctcgccctgccccaccggacaccgtagcagcagccccagcagcgacgggacaaaatgggagagtgaggctgtcctgcgtggaccagctcgtggccgagactgatcggtgcgtcgggccgggccgagtagagccggggacgcggggctagaccgtctacagcgcctctgagcggagcgggcccggcccgtggcccgagcggcggccgcagctggcacagctcctcacccgccctttgctttcgcctttcctcttctccctcccttgttgcccggagggagtctccaccctgcttctctttctctacccgctcctgcccatctcgggacggggacccctccatggcgacggcggccggggcccgctagactgaagcacctcgccggagcgacgaggctggtggcgacggcgctgtcggctgtcgtgaggggctgccgggtgggatgcgactttgggcgtccgagcggctgtgggtcgctgttgcccccggcccggggtctggagagcggaggtcccctcagtgaggggaagacgggggaaccgggcgcacctggtgaccctgaggttccggctcctccgccccgcggctgcgaacccaccgcggaggaagttggttgaaattgctttccgctgctggtgctggtaagagggcattgtcacagcagcagcaacatgtcgactggggacagttttgagactcgatttgaaaaaatggacaacctgctgcgggatcccaaatcggaagtgaattcggattgtttgctggatggattggatgctttggtatatgatttggattttcctgccttaagaaaaaacaaaaatattgacaactttttaagcagatataaagacacaataaataaaatcagagatttacgaatgaaagctgaagattatgaagtagtgaaggtgattggtagaggtgcatttggagaagttcaattggtaaggcataaatccaccaggaaggtatatgctatgaagcttctcagcaaatttgaaatgataaagagatctgattctgcttttttctgggaagaaagggacatcatggcttttgccaacagtccttgggttgttcagcttttttatgcattccaagatgatcgttatctctacatggtgatggaatacatgcctggtggagatcttgtaaacttaatgagcaactatgatgtgcctgaaaaatgggcacgattctatactgcagaagtagttcttgcattggatgcaatccattccatgggttttattcacagagatgtgaagcctgataacatgctgctggataaatctggacatttgaagttagcagattttggtacttgtatgaagatgaataaggaaggcatggtacgatgtgatacagcggttggaacacctgattatatttcccctgaagtattaaaatcccaaggtggtgatggttattatggaagagaatgtgactggtggtcggttggggtatttttatacgaaatgcttgtaggtgatacacctttttatgcagattctttggttggaacttacagtaaaattatgaaccataaaaattcacttacctttcctgatgataatgacatatcaaaagaagcaaaaaaccttatttgtgccttccttactgacagggaagtgaggttagggcgaaatggtgtagaagaaatcaaacgacatctcttcttcaaaaatgaccagtgggcttgggaaacgctccgagacactgtagcaccagttgtacccgatttaagtagtgacattgatactagtaattttgatgacttggaagaagataaaggagaggaagaaacattccctattcctaaagctttcgttggcaatcaactaccttttgtaggatttacatattatagcaatcgtagatacttatcttcagcaaatcctaatgataacagaactagctccaatgcagataaaagcttgcaggaaagtttgcaaaaaacaatctataagctggaagaacagctgcataatgaaatgcagttaaaagatgaaatggagcagaagtgcagaacctcaaacataaaactagacaagataatgaaagaattggatgaagagggaaatcaaagaagaaatctagaatctacagtgtctcagattgagaaggagaaaatgttgctacagcatagaattaatgagtaccaaagaaaagctgaacaggaaaatgagaagagaagaaatgtagaaaatgaagtttctacattaaaggatcagttggaagacttaaagaaagtcagtcagaattcacagcttgctaatgagaagctgtcccagttacaaaagcagctagaagaagccaatgacttacttaggacagaatcggacacagctgtaagattgaggaagagtcacacagagatgagcaagtcaattagtcagttagagtccctgaacagagagttgcaagagagaaatcgaattttagagaattctaagtcacaaacagacaaagattattaccagctgcaagctatattagaagctgaacgaagagacagaggtcatgattctgagatgattggagaccttcaagctcgaattacatctttacaagaggaggtgaagcatctcaaacataatctcgaaaaagtggaaggagaaagaaaagaggctcaagacatgcttaatcactcagaaaaggaaaagaataatttagagatagatttaaactacaaacttaaatcattacaacaacggttagaacaagaggtaaatgaacacaaagtaaccaaagctcgtttaactgacaaacatcaatctattgaagaggcaaagtctgtggcaatgtgtgagatggaaaaaaagctgaaagaagaaagagaagctcgagagaaggctgaaaatcgggttgttcagattgagaaacagtgttccatgctagacgttgatctgaagcaatctcagcagaaactagaacatttgactggaaataaagaaaggatggaggatgaagttaagaatctaaccctgcaactggagcaggaatcaaataagcggctgttgttacaaaatgaattgaagactcaagcatttgaggcagacaatttaaaaggtttagaaaagcagatgaaacaggaaataaatactttattggaagcaaagagattattagaatttgagttagctcagcttacgaaacagtatagaggaaatgaaggacagatgcgggagctacaagatcagcttgaagctgagcaatatttctcgacactttataaaacccaggtaaaggaacttaaagaagaaattgaagaaaaaaacagagaaaatttaaagaaaatacaggaactacaaaatgaaaaagaaactcttgctactcagttggatctagcagaaacaaaagctgagtctgagcagttggcgcgaggccttctggaagaacagtattttgaattgacgcaagaaagcaagaaagctgcttcaagaaatagacaagagattacagataaagatcacactgttagtcggcttgaagaagcaaacagcatgctaaccaaagatattgaaatattaagaagagagaatgaagagctaacagagaaaatgaagaaggcagaggaagaatataaactggagaaggaggaggagatcagtaatcttaaggctgcctttgaaaagaatatcaacactgaacgaacccttaaaacacaggctgttaacaaattggcagaaataatgaatcgaaaagattttaaaattgatagaaagaaagctaatacacaagatttgagaaagaaagaaaaggaaaatcgaaagctgcaactggaactcaaccaagaaagagagaaattcaaccagatggtagtgaaacatcagaaggaactgaatgacatgcaagcgcaattggtagaagaatgtgcacataggaatgagcttcagatgcagttggccagcaaagagagtgatattgagcaattgcgtgctaaacttttggacctctcggattctacaagtgttgctagttttcctagtgctgatgaaactgatggtaacctcccagagtcaagaattgaaggttggctttcagtaccaaatagaggaaatatcaaacgatatggctggaagaaacagtatgttgtggtaagcagcaaaaaaattttgttctataatgacgaacaagataaggagcaatccaatccatctatggtattggacatagataaactgtttcacgttagacctgtaacccaaggagatgtgtatagagctgaaactgaagaaattcctaaaatattccagatactatatgcaaatgaaggtgaatgtagaaaagatgtagagatggaaccagtacaacaagctgaaaaaactaatttccaaaatcacaaaggccatgagtttattcctacactctaccactttcctgccaattgtgatgcctgtgccaaacctctctggcatgtttttaagccaccccctgccctagagtgtcgaagatgccatgttaagtgccacagagatcacttagataagaaagaggacttaatttgtccatgtaaagtaagttatgatgtaacatcagcaagagatatgctgctgttagcatgttctcaggatgaacaaaaaaaatgggtaactcatttagtaaagaaaatccctaagaatccaccatctggttttgttcgtgcttcccctcgaacgctttctacaagatccactgcaaatcagtctttccggaaagtggtcaaaaatacatctggaaaaactagttaaccatgtgactgagtgccctgtggaatcgtgtgggatgctacctgataaaccaggcttctttaaccatgcagagcagacaggctgtttctttgacacaaatatcacaggcttcagggttaagattgctgtttttctgtccttgctttggcacaacacactgagggttttttttattgcgggtttgcctacaggtagattagattaattattactatgtaatgcaagtacagttgggggaaagcttaggtagatatattttttttaaaaggtgctgcctttttggatttataagaaaatgcctgtcagtcgtgatagaacagagttttcctcatatgagtaagaggaagggactttcactttcaagtggaacagccatcactatcaagatcagctcatggaaggagtaaagaaaatatctcaaaatgagacaaactgaagttttgttttttttttaatgacttaagtttttgtgctcttgcaagactatacaaaactattttaagaaagcagtgatatcacttgaacttcagtgccctcactgtagaatttaaaagccttactgttgattgcccatgttggacttgatggagaaattaaatatctttcattatgctttacaaaatactgtatatgtttcagcaagtttggggaatgggagaggacaaaaaaaagttacatttaatctatgcatttttgccaagccatattgagttattttactactagagacattaggaaactaactgtacaaaagaaccaagtttaaaagcattttgtggggtacatcatttctataattgtataatgtatttctttgtggttttaaatgataaagacattaagttaacaaacatataagaaatgtatgcactgtttgaaatgtaaattattcttagaacactttcaatgggggttgcattgtccttttagtgccttaatttgagataattattttactgccatgagtaagtatagaaatttcaaaaaatgtattttcaaaaaattatgtgtgtcagtgagtttttcattgataattggtttaatttaaaatatttagaggtttgttggactttcataaattgagtacaatctttgcatcaaactacctgctacaataatgactttataaaactgcaaaaaatgtagaaggttgcaccaacataaaaaggaaatatggcaatacatccatgatgttttccagttaacataggaattaccagataaatactgttaaactcttgtccagtaacaagagttgattcatatggacagtatgatttattgtttatttttttaaccaaatacctcctcagtaatttataatggctttgcagtaatgtgtatcagataagaagcactggaaaaccgatcgtctctaggatgatatgcatgtttcaagtggtattgaaagccgcactgatggatatgtaataataaacatatctgttattaatatactaatgactctgtgctcatttaatgagaaataaaagtaatttatggatgggtatctttaatttttactgcaatgtgttttctcatggctgaaatgaatggaaaacatacttcaaattagtctctgattgtatataaatgtttgtgaaattccatggttagattaaagtgtatttttaaaagataaaa

SEQ ID NO: 1948 - DNA, 4091 bp, Homo sapiens
agccagcccttgccgtggccggagccgagcggcgcatccgggccggagaagaggacgacgacgaggtcctcgaagtggacccgtttgcgaagcgccagggagaaggaggagcggacgcatcgtagaaaggggtggtggcgcccgaccccgcgccccggcccgaagctctgagggcttcccggcccccactgcctgcggcatggcccggggctcggcgctcccgcggcggccgctgctgtgcatcccggccgtctgggcggccgccgcgcttctgctctcagtgtcccggacttcaggtgaagtggaggttctggatccgaacgaccctttaggaccccttgatgggcaggacggcccgattccaactctgaaaggttactttctgaattttctggagccagtaaacaatatcaccattgtccaaggccagacggcaattctgcactgcaaggtggcaggaaacccaccccctaacgtgcggtggctaaagaatgatgccccggtggtgcaggagccgcggcggatcatcatccggaagacagaatatggttcacgactgcgaatccaggacctggacacgacagacactggctactaccagtgcgtggccaccaacgggatgaagaccattaccgccactggcgtcctgtttgtgcggctgggtccaacgcacagcccaaatcataactttcaggatgattaccacgaggatgggttctgccagccttaccggggaattgcctgtgcacgcttcattggcaaccggaccatttatgtggactcgcttcagatgcagggggagattgaaaaccgaatcacagcggccttcaccatgatcggcacgtctacgcacctgtcggaccagtgctcacagttcgccatcccatccttctgccacttcgtgtttcctctgtgcgacgcgcgctcccggacacccaagccgcgtgagctgtgccgcgacgagtgcgaggtgctggagagcgacctgtgccgccaggagtacaccatcgcccgctccaacccgctcatcctcatgcggcttcagctgcccaagtgtgaggcgctgcccatgcctgagagccccgacgctgccaactgcatgcgcattggcatcccagccgagaggctgggccgctaccatcagtgctataacggctcaggcatggattacagaggaacggcaagcaccaccaagtcaggccaccagtgccagccgtgggccctgcagcacccccacagccaccacctgtccagcacagacttccctgagcttggaggggggcacgcctactgccggaaccccggaggccagatggagggcccctggtgctttacgcagaataaaaacgtacgcatggaactgtgtgacgtaccctcgtgtagtccccgagacagcagcaagatggggattctgtacatcttggtccccagcatcgcaattccactggtcatcgcttgccttttcttcttggtttgcatgtgccggaataagcagaaggcatctgcgtccacaccgcagcggcgacagctgatggcctcgcccagccaagacatggaaatgcccctcattaaccagcacaaacaggccaaactcaaagagatcagcctgtctgcggtgaggttcatggaggagctgggagaggaccggtttgggaaagtctacaaaggtcacctgttcggccctgccccgggggagcagacccaggctgtggccatcaaaacgctgaaggacaaagcggaggggcccctgcgggaggagttccggcatgaggctatgctgcgagcacggctgcaacaccccaacgtcgtctgcctgctgggcgtggtgaccaaggaccagcccctgagcatgatcttcagctactgttcgcacggcgacctccacgaattcctggtcatgcgctcgccgcactcggacgtgggcagcaccgatgatgaccgcacggtgaagtccgccctggagccccccgacttcgtgcaccttgtggcacagatcgcggcggggatggagtacctatccagccaccacgtggttcacaaggacctggccacccgcaatgtgctagtgtacgacaagctgaacgtgaagatctcagacttgggcctcttccgagaggtgtatgccgccgattactacaagctgctggggaactcgctgctgcctatccgctggatggccccagaggccatcatgtacggcaagttctccatcgactcagacatctggtcctacggtgtggtcctgtgggaggtcttcagctacggcctgcagccctactgcgggtactccaaccaggatgtggtggagatgatccggaaccggcaggtgctgccttgccccgatgactgtcccgcctgggtgtatgccctcatgatcgagtgctggaacgagttccccagccggcggccccgcttcaaggacatccacagccggctccgagcctggggcaacctttccaactacaacagctcggcgcagacctcgggggccagcaacaccacgcagaccagctccctgagcaccagcccagtgagcaatgtgagcaacgcccgctacgtggggcccaagcagaaggccccgcccttcccacagccccagttcatccccatgaagggccagatcagacccatggtgcccccgccgcagctctacgtccccgtcaacggctaccagccggtgccggcctatggggcctacctgcccaacttctacccggtgcagatcccaatgcagatggccccgcagcaggtgcctcctcagatggtccccaagcccagctcacaccacagtggcagtggctccaccagcacaggctacgtcaccacggccccctccaacacatccatggcagacagggcagccctgctctcagagggcgctgatgacacacagaacgccccagaagatggggcccagagcaccgtgcaggaagcagaggaggaggaggaaggctctgtcccagagactgagctgctgggggactgtgacactctgcaggtggacgaggcccaagtccagctggaagcttgagtggcaccagggcccggggttcggggatagaagccccgccgagaccccacagggacctcagtcacctttgagaagacaccatactcagcaatcacaagagcccgccggccagtgggcttgtttgcagactgggtgaggtggagccctgctcctctctgtcctctgacacagagagctgccctgcctaggagcacccaagccaggcagggggtctggcagcacggcgtcctggggagcaggacacatggtcatccccagggctgtatacattgattctggtggtagactggtagtgagcagcaaatgcctttcaagaaaataggtggcagcttcactccatgtcatatatggagtgaatatttcaaaacgttgggaataagggcctgcaaaaggcagcgaggaggcacctcgggtcttgaggttcctgacaaccgatctggtctgttggtttgaggatgaaggggctccatttctgctgcctccctgctgagaatattctccctttagcagccaaagattcgctggaacggaggctgccctctgctgcctgttggggtcggaagacaaggggcttctgaaatgggagttcctgagatacaacaaaatgtgtgccttcaaagaaactgacagctttgtatttggtgaaatggttttaattatactccatgtgtattttgcccactttttttgggaattcaagggaaagtgtttcttgggtttggaatgttcagaggaagcagtattgtacagaacacggtattgttatttttgttaagaatcatgtacagagcttaaatgtaatttatatgtttttaatatgccattttcattgaagtattttggtcttaagatgactttagtaatttaactgtttatgttacccacgttgggatccagttggtcttggtttgcttctctctgtaccacgtgcacatgaggtccattcattttacagcccctgttacacacagacccacaggcagccgtctgtgccccgcacacattgttggtcctatttgtaaatcccacacccggtgtatccaataaagtgaaacaaagc

SEQ ID NO: 1949 - DNA, 3813 bp, Homo sapiens
ccacgcgtccgggggtgctgggcctggcgggcaaactaaggctgcggaccgttgggcggttccgcggggcgttgtccggagagctgcgaggccggggttcccagggttcacgccacactctaggaagtgcctgagctagtgagctggccaacgagctccgcgggctgggaccatgggctgcttcttctccaagagacggaaggctgacaaggagtcgcggcccgagaacgaggaggagcggccaaagcagtacagctgggatcagcgcgagaaggttgatccaaaagactacatgttcagtggactgaaggatgaaacagtaggtcgcttacctgggacggtagcaggacaacagtttctcattcaagactgtgagaactgtaacatctatatttttgatcactctgctacagttaccattgatgactgtactaactgcataatttttctgggacccgtgaaaggcagcgtgtttttccggaattgcagagattgcaagtgcacattagcctgccaacaatttcgtgtgcgagattgtagaaagctggaagtctttttgtgttgtgccactcaacccatcattgagtcttcctcaaatatcaaatttggatgttttcaatggtactatcctgaattagctttccagttcaaagatgcagggctaagtatcttcgacaatacatggagtaacattcatgactttacacctgtgtcaggagaactcaactggagccttcttccagaagatgctgtggttcaggactatgttcctatacctactaccgaagagctcaaagctgttcgtgtttccacagaagccaatagaagcattgttccaatatcccggggtcagagacagaagagcagcgatgaatcatgcttagtggtattatttgctggtgattacactattgcaaatgccagaaaactaattgatgagatggttggtaaaggctttttcctagttcagacaaaggaagtgtccatgaaagctgaggatgctcaaagggtttttcgggaaaaagcacctgacttccttcctcttctgaacaaaggtcctgttattgccttggagtttaatggggatggtgctgtagaagtatgtcaacttattgtaaacgagatattcaatgggaccaagatgtttgtatctgaaagcaaggagacggcatctggagatgtagacagcttctacaactttgctgatatacagatgggaatatgaagtgcaatgtggaaccaggacttggtattaagcctttcccaacttgtgaatatagaatttgataatacacttttgtgtattagcaatggtttttactaatgctaaaacttttaaagtttattttttaataaattgttgagtattacatcatttacttgaggttcaaaaataattcattttaaattaagtagttttaatcagcttaaaagctatttaacccattttaataagcttgcagttttgtttctctgcatatgatattcttattagaaaacagaagtagctaaaagtttattattttaatcctatttaaatgttctttcaaatctctaataatttaaactttcctcagtgctccatgatactttttttgagactccatatcattgcttattttacctttttcaattaagagggatttgttactagtcgatcaattagaatgaacctatgcacatttttatgtacacatatccagttatataattgcttcctagttgcattatatggcaaatgagattttgtacatggagttgacataatactttgtaaattgaattttttaaagaaataggcatttgataaccagcttggcaagtaactctactaacagatgttggtatagctatttaaagactacttcgtaagtagtatgattatttgaataaattacacattgtttagttttttaatacaactgctatatgactcttctgcttcctgataagaaaaggtatatgcaatgctaaaactgtagaagcccaatcaccagcagtttttaaaaaggtgataacttttattagctcttgtgggctatcaagagaattagaccaaacccttgtgacttttaggtaagaaataggcatgatgataagctatgcagattattaaaaagcttgatacatttgatttttcattagatatgccattcatatcaagtaatgttcaagtatgataaaattattttggttgctttaaagcactgtttcccaaatctacctgatcataataatttaccaggaagcagaggagagctacttgtttaaaaatccacattcttggacccaatcctcagatgcacggattcagtcttcaggggaaactctgttttaaggggtatgttgtaatctaaagtaattggttcaggaggtgtcaataggttgaacttgtgagaaggcactgaatctgccatccacatcacatatagcagctattatgaaatcagctttcataggcctatttttaaaaggaatctgaaatttaattctattttgataaaactaagactgaaaataaccacttgtaaacattcctatgattgttactaaaatgtattttcatgtttaaaatgtttttggatatttttgggttaataactactacattgaattgcatgttaaggtgcagaaataatacattaaaagattttcactttaaattaattagtaatattgagcgctcaccctgtgcgtggccttgtgctaaccattagcactgcatcatttcaattcttttataagggcattcaatactacaaaatcaacatgatttcataaggtgcaaataaaagttggtgacagatttaatataattttgatcacaatttacaaatgatctttgcaaatagtggtcagacggcattagtttttcccttagttaagctaaattaaagggactccatcctgttatgattatattattattattattattattatttttgaggtggagtttcactcttgttgcccaagctggagtgcaatggcgcgatctcggctcaccacaacatccgcctcctgggttcaagcgattctcctgcctcagcctcctgagtagctgggaatacagcatgcgccactacacctggctaatttttgtatttttagttgagatggggtttttccacgttggtcaggctggtctcgaactcctgacctcaggtgatccgtccacctcagcctcccaaagagctgggattacaggtgtgagctaccgcgcctggccatgatgatattattaaacaccattattcacatttcaaataataacaatactttttgtttttcaaaaataaaatgcaatgttatataaagctataaactaagttctttatgatatttgagcaacaactcaggaatataacatataagggagatgttaatttaaaaatttccactacacttattatctattaaccaaagcttaaaattttgtattcttctgttagataagaccttttacccatttaatttgtctttaaggacagtcatttggcttctgaatgtttgaaacgattttaaaaaataagtagtgctatggttgtttctataattctaacctttgatagtaatcagaatgtattacatttcatttctgaatagcttttgaatttatgaaaaattattaacaatgaaaaattggtaattttattaagttatatgtgtttaaatattatattagcttatttctcttgcattaatagtactgctgtttttgttttgcttctttatatttatgtctagcttttatatgtaatttatctagtgtttataaaatgtgatttgtaataaatgttgttaaaatgaaaa

SEQ ID NO: 1950 - DNA, 1184 bp, Homo sapiens
ggcgctgcgggggctgacatgtcgtcccggcctgggcgcgaggacgtgggggctgcgggcgcgcggcggccgcgtgagccgccggagcaggagctgcagcgacgtcgggagcagaagcggcggcgacacgacgcgcagcagctgcagcagctcaagcacctggagtccttttacgaaaaacctcctcctgggcttatcaaggaagatgagactaagccagaagattgcataccagatgtaccaggcaatgaacacgccagggaatttctggctcatgcaccaactaaaggactttggatgccactggggaaagaagtcaaagttatgcagtgttggcgttgcaaacgctatggtcaccgaacgggtgacaaagaatgccctttctttatcaaaggcaaccaaaagttagagcagttcagagtggcacatgaagatcccatgtatgacatcatacgagacaataaacgacatgaaaaggacgtaaggatacagcagttaaaacagttactggaggattctacctcagatgaagataggagcagctccagttcctctgaaggtaaagagaaacacaagaaaaagaagaagaaagaaaagcataagaaaaggaagaaagaaaagaaaaagaagaaaaaacggaagcacaaatcttccaagtcaaatgagggttctgactcagagtgacaaggatgtgacttgttcaacattctcttctcaaacactgaccaaggaacagaggaagatgcagtcagagaaagcagcaggatagagacgccgagagaggagtatatgtgggtcacagcagtgagctcccacccgccttgcagtgaagatgtgaccccaggagagggagtgtctccttccaggtgctagctctggacagcagctgattttaggcaggaaagtttcttcatcgttgtcctccctgctggtcacatgagtttacgattcctttgaagtgtctcccacagggtggcaggactgggagaatctctgaggcgtgtcttccaggccctcccacagcttgtgccctccacagtgtggactcaggtcccatagacatcaggctggagtcttctctgttgttgagaataataaaagctcattatttattttttaaaaaaaaaaaaaaaaaaaaaaaaaaaaaaaaaaaaaaaaaaaaaaaaaaaaaaaaaaaaaaaaaa

SEQ ID NO: 1951 - DNA, 2824 bp, Homo sapiens
ggagctgttgcggggtccgcggggaagtcttggcggtggagccatggtcggccaactgagcgagggggccattgcggccatcatgcagaagggggatacaaacataaagcccatcctccaagtcatcaacatccgtcccattactacggggaatagtccgccgcgttatcgactgctcatgagtgatggattgaacactctatcctctttcatgttggcgacacagttgaaccctctcgtggaggaagaacaattgtccagcaactgtgtatgccagattcacagatttattgtgaacactctgaaagacggaaggagagtagttatcttgatggaattagaagttttgaagtcagctgaagcagttggagtgaagattggcaatccagtgccctataatgaaggactcgggcagccgcaagtagctcctccagcgccagcagccagcccagcagcaagcagcaggccccagccgcagaatggaagctcgggaatgggttctactgtttctaaggcttatggtgcttcaaagacatttggaaaagctgcaggtcccagcctgtcacacacttctgggggaacacagtccaaagtggtgcccattgccagcctcactccttaccagtccaagtggaccatttgtgctcgtgttaccaacaaaagtcagatccgtacctggagcaactcccgaggggaagggaagcttttctccctagaactggttgacgaaagtggtgaaatccgagctacagctttcaatgagcaagtggacaagttctttcctcttattgaagtgaacaaggtgtattatttctcgaaaggcaccctgaagattgctaacaagcagttcacagctgttaaaaatgactacgagatgaccttcaataacgagacttccgtcatgccctgtgaggacgaccatcatttacctacggttcagtttgatttcacggggattgatgacctcgagaacaagtcgaaagactcacttgtagacatcatcgggatctgcaagagctatgaagacgccactaaaatcacagtgaggtctaacaacagagaagttgccaagaggaatatctacttgatggacacatctgggaaggtggtgactgctacactgtggggggaagatgctgataaatttgatggttctagacagcccgtgttggctatcaaaggagcccgagtctctgatttcggtggacggagcctctccgtgctgtcttcaagcactatcattgcgaatcctgacatcccagaggcctataagcttcgtggatggtttgacgcagaaggacaagccttagatggtgtttccatctctgatctaaagagcggcggagtcggagggagtaacaccaactggaaaaccttgtatgaggtcaaatccgagaacctgggccaaggcgacaagccggactactttagttctgtggccacagtggtgtatcttcgcaaagagaactgcatgtaccaagcctgcccgactcaggactgcaataagaaagtgattgatcaacagaatggattgtaccgctgtgagaagtgcgacaccgaatttcccaatttcaagtaccgcatgatcctgtcagtaaatattgcagattttcaagagaatcagtgggtgacttgtttccaggagtctgctgaagctatccttggacaaaatgctgcttatcttggggaattaaaagacaagaatgaacaggcatttgaagaagttttccagaatgccaacttccgatctttcatattcagagtcagggtcaaagtggagacctacaacgacgagtctcgaattaaggccactgtgatggacgtgaagcccgtggactacagagagtatggccgaaggctggtcatgagcatcaggagaagtgcattgatgtgagaggagcagtgccaatcgggcagaagtttgcaaataggcagaatggaatcgatttcctcccacctccgtgtgacgatcccatgttagctacacagtgcagaggctcttgatggtggactaagcaatttcctcccttgtgcgcatctcagaacccatcggtaggcaaaggaaaatacgctcaggtggttgtggtgtagactgtgtcaggcctacggagtcagccagtggctagcgcaagaccagtcactccctctgccttcaggcttctgtcaatttcattatcatcaagcaggaattatgtcgtaagtcactgaccctaactgcagaccatgaagtaaattatgtaactaggtttttgcttctccagtggtgaccaccccccccccatccccgctcacaacttgggttcttctcagcggggcgagctgagaagcggtcatgagcacctggggattttagtaagtgtgtcttcctagaattcgaaggctctctctttctagaggtgctacatagttggtaatgcttggaatggcaatagggtagaatgattaatcaaaggcatatcttctatatctgaagagtatccttccttcagggtttaatagactgagtcagatgggtctgatattaatcaaaattgtctcttctgaggaccgctgataagcattgacttgctgtcccctaaggaaatccgagcggctacaaagcgtttctttacttttcacttcaattaatgctgcgcttcgcttggtgagtgcgtactttttctacctgtacacattcctgcattcatgtattttgttttttttgactaaagctatgttacatggaaaggattttgaagccttttgtttcccttgctttgttttaataaacagtatattctttggttgtgaatcctaaaaaaaaaaaaaaaaaaaaaaaaaaaaa

SEQ ID NO: 1952 - DNA, 1741 bp, Homo sapiens
cttcgtaaagatggccgcggaggcttttggagccaactgggagcgcagtacgcgttttctggagcatgggcagaggagacaggaacaagcgtagcatccgtgagcaccgattggctgaagcgagcaccccgggagctgactggctccgccattcgcgggaaggcgtttgtggtgccagagaaaagtagccagagcggcgcagtggcggccgcgttctgtggttttccgctattcccccagacccgcaccttctcggcctctttgcggagaatcgtgaccaagatgtggaacagtggattcgaaagctatggcagctcctcatacgggggagccggcggctacacgcagtccccggggggctttggatcgcccgcaccttctcaagccgaaaagaaatcaagagcccgagcccagcacattgtgccctgtactatatctcagctgctttctgccactttggttgatgaagtgttcagaattgggaatgttgagatttcacaggtcactattgtggggatcatcagacatgcagagaaggctccaaccaacattgtttacaaaatagatgacatgacagctgcacccatggacgttcgccagtgggttgacacagatgacaccagcagtgaaaacactgtggttcctccagaaacatatgtgaaagtggcaggccacctgagatcttttcagaacaaaaagagcctggtagcctttaagatcatgcccctggaggatatgaatgagttcaccacacatattctggaagtgatcaatgcacacatggtactaagcaaagccaacagccagccctcagcagggagagcacctatcagcaatccaggaatgagtgaagcagggaactttggtgggaatagcttcatgccagcaaatggcctcactgtggcccaaaaccaggtgttgaatttgattaaggcttgtccaagacctgaagggttgaactttcaggatctcaagaaccagctgaaacacatgtctgtatcctcaatcaagcaagctgtggattttctgagcaatgaggggcacatctattctactgtggatgatgaccattttaaatccacagatgcagaataactggatctaactgggtacctgagatattttacagctggacctagtttcacaatctgttgtctccagctctgcatatgtctggccagggggcttctaggaagtaggtttcatctatcaaatgtctcctctgacttccttttgaaacttactgctcttctgttttattttgttttgtttgaagctcagagggagatgggcaattgacagggatgcaatccagggtgggatttcttgaggaagttacaaataagcttgttacaacatcaagatagatggaattggaaggatgctaccaggagagtacttacatagtgctcaggagtttctcttcttaaaatgtttactgctgaaagatgagcaggaccagggcgttataggcagagccctagccgagaaacctgctggcctctgcctgttttcatttcccactttggttgtgtggcattactttcagaattgcactttcctgcttgtcatgactttttgacacacttgccatgacgtgtgtttctgtgaacatgaagttctgcggtagtgcctccaggggcagaggaaaagaagaagtgttactgcgttttgtacaaaataaatacagtcatatgtttaataaaacagttctattgtaaaaaaaaaaaaaaaaaaaaaa

SEQ ID NO: 1953 - DNA, 3950 bp, Homo sapiens
atgtcacatctggtggaccctacatcaggagacttgccagttagagacatagatgctatacctctggtgctaccagcctcaaaaggtaagaatatgaaaactcaaccacccttgagcaggatgaaccgggaggaattggaggacagtttctttcgacttcgcgaagatcacatgttggtgaaggagctttcttggaagcaacaggatgagatcaaaaggctgaggaccaccttgctgcggttgaccgctgctggccgggacctgcgggtcgcggaggaggcggcgccgctctcggagaccgcaaggcgcgggcagaaggcgggatggcggcagcgcctctccatgcaccagcgcccccagatgcaccgactgcaagggcatttccactgcgtcggccctgccagcccccgccgcgcccagcctcgcgtccaagtgggacacagacagctccacacagccggtgcaccggtgccggagaaacccaagagggggccaagggacaggctgagctacacagcccctccatcgtttaaggagcatgcgacaaatgaaaacagaggtgaagtagccagtaaacccagtgaacttgtttctggttctaacagcataatttctttcagcagtgtcataagtatggctaaacccattggtctatgcatgcctaacagtgcccacatcatggccagcaataccatgcaagtggaagagccacccaagtctcctgagaaaatgtggcctaaagatgaaaattttgaacagagaagctcattggagtgtgctcagaaggctgcagagcttcgagcttccattaaagagaaggtagagctgattcgacttaagaagctcttacatgaaagaaatgcttcattggttatgacaaaagcacaattaacagaagttcaagaggcatacgaaaccttgctccagaagaatcagggaatcctgagtgcagcccatgaggccctcctcaagcaagtgaatgagctcagggcagagctgaaggaagaaagcaagaaggctgtgagcttgaagagccaactggaagatgtgtctatcttgcagatgactctgaaggagtttcaggagagagttgaagatttggaaaaagaacgaaaattgctgaatgacaattatgacaaactcttagaaagcatgctggacagcagtgacagctccagtcagccccactggagcaacgagctcatagcggaacagctacagcagcaagtctctcagctgcaggatcagctggatgctgagctggaggacaagagaaaagttttacttgagctgtccagggagaaagcccaaaatgaggatctgaagcttgaagtcaccaacatacttcagaagcataaacaggaagtagagctcctccaaaatgcagccacaatttcccaacctcctgacaggcaatctgaaccagccactcacccagctgtattgcaagagaacactcagatcgagccaagtgaacccaaaaaccaagaagaaaagaaactgtcccaggtgctaaatgagttgcaagtatcacacgcagagaccacattggaactagaaaagaccagggacatgcttattctgcagcgcaaaatcaacgtgtgttatcaggaggaactggaggcaatgatgacaaaagctgacaatgataatagagatcacaaagaaaagctggagaggttgactcgactactagacctcaagaataaccgtatcaagcagctggaaggtattttaagaagccatgaccttccaacatctgaacagctcaaagatgttgcttatggcacccgaccgttgtcgttatgtttggaaacactgccagcccatggagatgaggataaagtggatatttctctgctgcatcagggtgagaatctttttgaactgcacatccaccaggccttcctgacatctgccgccctagctcaggctggagatacccaacctaccactttctgcacctattccttctatgactttgaaacccactgtaccccattatctgtggggccacagcccctctatgacttcacctcccagtatgtgatggagacagattcgcttttcttacactaccttcaagaggcttcagcccggcttgacatacaccaggccatggccagtgaacacagcactcttgctgcaggatggatttgctttgacagggtgctagagactgtggagaaagtccatggcttggccacactgattggagctggtggagaagagttcggggttctagagtactggatgaggctgcgtttccccataaaacccagcctacaggcgtgcaataaacgaaagaaagcccaggtctacctgtcaaccgatgtgcttggaggccggaaggcccaggaagaggagttcagatcggagtcttgggaacctcagaacgagctgtggattgaaatcaccaagtgctgtggcctccggagtcgatggctgggaactcaacccagtccatatgctgtgtaccgcttcttcaccttttctgaccatgacactgccatcattccagccagtaacaacccctactttagagaccaggctcgattcccagtgcttgtgacctctgacctggaccattatctgagacgggaggccttgtctatacatgtttttgatgatgaagacttagagcctggctcgtatcttggccgagcccgagtgcctttactgcctcttgcaaaaaatgaatctatcaaaggtgattttaacctcactgaccctgcagagaaacccaacggatctattcaagtgcaactggattggaagtttccctacataccccctgagagcttcctgaaaccagaagctcagactaaggggaaggataccaaggacagttcaaagatctcatctgaagaggaaaaggcttcatttccttcccaggatcagatggcatctcctgaggttcccattgaagctggccagtatcgatctaagagaaaacctcctcatgggggagaaagaaaggagaaggagcaccaggttgtgagctactcaagaagaaaacatggcaaaagaataggtgttcaaggaaagaatagaatggagtatcttagccttaacatcttaaatggaaatacaccagagcaggtgaattacactgagtggaagttctcagagactaacagcttcataggtgatggctttaaaaatcagcacgaggaagaggaaatgacattatcccattcagcactgaaacagaaggaacctctacatcctgtaaatgacaaagaatcctctgaacaaggttctgaagtcagtgaagcacaaactaccgacagtgatgatgtcatagtgccacccatgtctcagaaatatcctaaggcagattcagagaagatgtgcattgaaattgtctccctggccttctacccagaggcagaagtgatgtctgatgagaacataaaacaggtgtatgtggagtacaaattctacgacctacccttgtcggagacagagactccagtgtccctaaggaagcctagggcaggagaagaaatccactttcactttagcaaggtaatagacctggacccacaggagcagcaaggccgaaggcggtttctgttcgacatgctgaatggacaagatcctgatcaaggacatttaaagtttacagtggtaagtgatcctctggatgaagaaaagaaagaatgtgaagaagtgggatatgcatatcttcaactgtggcagatcctggagtcaggaagagatattctagagcaagagctagacattgttagccctgaagatctggctaccccaataggaaggctgaaggtttcccttcaagcagctgctgtcctccatgctatttacaaggagatgactgaagatttgttttcatgaaggaacaagtgctattccaatctaaaagtctctgagggaaccatagtaaaaagtctcttataaagttagcttgctataacatgaaaaaa

SEQ ID NO: 1954 - DNA, 2188 bp, Homo sapiens
ctctttcccttcggtgtgccactgaagatcctggtgtcgccatgggccgccgccccgcccgttgttaccggtattgtaagaacaagccgtacccaaagtctcgcttctgccgaggtgtccctgatgccaagattcgcatttttgacctggggcggaaaaaggcaaaagtggatgagtttccgctttgtggccacatggtgtcagatgaatatgagcagctgtcctctgaagccctggaggctgcccgaatttgtgccaataagtacatggtaaaaagttgtggcaaagatggcttccatatccgggtgcggctccaccccttccacgtcatccgcatcaacaagatgttgtcctgtgctggggctgacaggctccaaacaggcatgcgaggtgcctttggaaagccccagggcactgtggccagggttcacattggccaagttatcatgtccatccgcaccaagctgcagaacaaggagcatgtgattgaggccctgcgcagggccaagttcaagtttcctggccgccagaagatccacatctcaaagaagtggggcttcaccaagttcaatgctgatgaatttgaagacatggtggctgaaaagcggctcatcccagatggctgtggggtcaagtacatccccagtcgtggccctctggacaagtggcgggccctgcactcatgagggcttccaatgtgctgcccccctcttaatactcaccaataaattctacttcctgtccacctatgtctttgtatctacattcttgacggggaaggaacttcctctgggaacctttgggtcattgccctttcacttcagaaacaggttgacaactcagccctgctcatgaggcagcaaaccctgcaaagggctgggactggtggccttatgtcagttgtctactctggagcttgacttggacctccccaggtcctaggcagtaggttgaaaaacactgaagtgcttttcatgaagcacagctgcagcaaagccttgcaatcccaggctggggtcagcctacagttgtgttgcttattacaacacatgcggaccaagaggggcttgtgggctagaggctgaccagcagcgtttatttagcaagggtaggtgtgcatcacattgggcttgttctcacccatctggtttggccattcctccttggtgggaatcatccaggtactgctgaggtcacctgcgatttgccccatttcctatctctagcaacctcctgggccccatgcccccaccccttctagaacctgcattcccagggccttcaccacctgaccaaaggtctaggctaacctttggtcatttgtaacaagacctcggaacagacacgtgtgtggcatggtttggcctggggatcttagatgtctgacctgaactattgtagaacagcgctggcttttgggggagcagcaaaaatgagaggagtgctaggtgggtggcctgagcatctgtatccagggacaggactccaaaggcttttggtcccagagctggggtatgttggccccagcccccagcctgtggctcccaaaaggcctctggttttttgtaatctcagtttacagccatttcttaggtttttaattacctttattttattttgccaaacatacctgggaataccttttattttttttttaccttggggtgatggttccaaaccataaatgtgattatagttaacacatgacccttctagcgtcccagccagtgtttttcctgacctctcttctttggagaggaggatggaagggaggggtccggcatgctgctggcattttgctgtgtcctgcagcccctttccgggacacctgggttcacacagctttttagcttacataactggtgcagattttctgtgtggagatgttgccttgaccagccttggctggactttaccaggcatgcagaagcctgtaccaacacagactacagcacccaggaggtgcgagtgtggctgctcagcggttataacaggcctgactgcattgttcaccggattataatgagccaaaatgtttcccggtgtttgctggtttcagggaaggagtttgatatagcagattaaccaccctccttgtagctattggggcttaatggtttcctggtgattcttaccaatccacaataaacatggcccattggcatatctgcaaaaaaaaaaaaaaaaa

SEQ ID NO: 1955 - DNA, 719 bp, Homo sapiens
agtctcttttccggttagcgcggcgtgagaagccatgagcagcaaagtctctcgcgacaccctgtacgaggcggtgcgggaagtcctgcacgggaaccagcgcaagcgccgcaagttcctggagacggtggagttgcagatcagcttgaagaactatgatccccagaaggacaagcgcttctcgggcaccgtcaggcttaagtccactccccgccctaagttctctgtgtgtgtcctgggggaccagcagcactgtgacgaggctaaggccgtggatatcccccacatggacatcgaggcgctgaaaaaactcaacaagaataaaaaactggtcaagaagctggccaagaagtatgatgcgtttttggcctcagagtctctgatcaagcagattccacgaatcctcggcccaggtttaaataaggcaggaaagttcccttccctgctcacacacaacgaaaacatggtggccaaagtggatgaggtgaagtccacaatcaagttccaaatgaagaaggtgttatgtctggctgtagctgttggtcacgtgaagatgacagacgatgagcttgtgtataacattcacctggctgtcaacttcttggtgtcattgctcaagaaaaactggcagaatgtccgggccttatatatcaagagcaccatgggcaagccccagcgcctatattaaggcacatttgaataaattctattaccagttc

SEQ ID NO: 1956 - DNA, 609 bp, Homo sapiens
ttctcttcctgctctccatcatggcgcaggatcaaggtgaaaaggagaaccccatgcgggaacttcgcatccgcaaactctgtctcaacatctgtgttggggagagtggagacagactgacgcgagcagccaaggtgttggagcagctcacagggcagacccctgtgttttccaaagctagatacactgtcagatcctttggcatccggagaaatgaaaagattgctgtccactgcacagttcgaggggccaaggcagaagaaatcttggagaagggtctaaaggtgcgggagtatgagttaagaaaaaacaacttctcagatactggaaactttggttttgggatccaggaacacatcgatctgggtatcaaatatgacccaagcattggtatctacggcctggacttctatgtggtgctgggtaggccaggtttcagcatcgcagacaagaagcgcaggacaggctgcattggggccaaacacagaatcagcaaagaggaggccatgcgctggttccagcagaagtatgatgggatcatccttcctggcaaataaattcccgtttctatccaaaagagcaataaaaagttttcagtgaaatgtgcaa

SEQ ID NO: 1957 - DNA, 1142 bp, Homo sapiens
cttttccaagcggctgccgaagatggcggaggtgcaggtcctggtgcttgatggtcgaggccatctcctgggccgcctggcggccatcgtggctaaacaggtactgctgggccggaaggtggtggtcgtacgctgtgaaggcatcaacatttctggcaatttctacagaaacaagttgaagtacctggctttcctccgcaagcggatgaacaccaacccttcccgaggcccctaccacttccgggcccccagccgcatcttctggcggaccgtgcgaggtatgctgccccacaaaaccaagcgaggccaggccgctctggaccgtctcaaggtgtttgacggcatcccaccgccctacgacaagaaaaagcggatggtggttcctgctgccctcaaggtcgtgcgtctgaagcctacaagaaagtttgcctatctggggcgcctggctcacgaggttggctggaagtaccaggcagtgacagccaccctggaggagaagaggaaagagaaagccaagatccactaccggaagaagaaacagctcatgaggctacggaaacaggccgagaagaacgtggagaagaaaattgacaaatacacagaggtcctcaagacccacggactcctggtctgagcccaataaagactgttaattcctcatgcgttgcctgcccttcctccattgttgccctggaatgtacgggacccaggggcagcagcagtccaggtgccacaggcagccctgggacataggaagctgggagcaaggaaagggtcttagtcactgcctcccgaagttgcttgaaagcactcggagaattgtgcaggtgtcatttatctatgaccaataggaagagcaaccagttactatgagtgaaagggagccagaagactgattggagggccctatcttgtgagtggggcatctgttggactttccacctggtcatatactctgcagctgttagaatgtgcaagcacttggggacagcatgagcttgctgttgtacacagggtatttctagaagcagaaatagactgggaagatgcacaaccaaggggttacaggcatcgcccatgctcctcacctgtattttgtaatcagaaataaattgcttttaaagaaaaaaaaaaaaaaaaaa

SEQ ID NO: 1958 - DNA, 2018 bp, Homo sapiens
cctttccgtctggcggcagccatcaggtaagccaagatgggtgcatacaagtacatccaggagctatggagaaagaagcagtctgatgtcatgcgctttcttctgagggtccgctgctggcagtaccgccagctctctgctctccacagggctccccgccccacccggcctgataaagcgcgccgactgggctacaaggccaagcaaggttacgttatatataggattcgtgttcgccgtggtggccgaaaacgcccagttcctaagggtgcaacttacggcaagcctgtccatcatggtgttaaccagctaaagtttgctcgaagccttcagtccgttgcagaggagcgagctggacgccactgtggggctctgagagtcctgaattcttactgggttggtgaagattccacatacaaattttttgaggttatcctcattgatccattccataaagctatcagaagaaatcctgacacccagtggatcaccaaaccagtccacaagcacagggagatgcgtgggctgacatctgcaggccgaaagagccgtggccttggaaagggccacaagttccaccacactattggtggctctcgccgggcagcttggagaaggcgcaatactctccagctccaccgttaccgctaatataagtaaagtttgtaaaattcatacttaataaacaatttaggacagtcatgtctgcttacaggtgttatttgtctgttaaaactagtctgcagatgtttcttgaatgctttgtcaaattaagaaagttaaagtgcaataatgtttgaagacaataagtggtggtgtatcttgtttctaataagataaacttttttgtctttgctttatcttattagggagttgtatgtcagtgtataaaacatactgtgtggtataacaggcttaataaattctttaaaaggagagaactgaaactagccctgtagatttgtctggtgcatgtgatgaaacctgcagctttatcggagtgatggcaatgctctgctggtttattttcaagtggctgcgttttttttagtttggcaggtgtagactttttaagttgggctttagaaaatctgggttagcctgaagaaaattgcctcagcctccacagtaccattttaaattcacataaaaggtgaaagctcctggttcagtgccatggcttcatggcattcagtgattagtggtaatggtaaacactggtgtgttttgaagttgaatgtgcgataaaattattagccttaagattggtaagctagcaatgaatgctagggtgggaagctggtgagccagtggccattagataaatacctttcaagtgtgagcttagacgtcaaccctaaaatacttaaccgtaatgctaattgtgatcattatgaatcccttcagtcacattagggggaaagtagttggctataagtacgtcattcttagtccagtcagtcttaaaaacatcttgggttacccactctgtccactcccataggctacagaaaaagtcacaagcgcatggtttccaaccatatgtgttttctgcagttatttctcttgttctggccaaacaaccctaaaaatccttaccattccacaaagttggaccatcacttgtgcacccactttgactatgagtataccaccacattgcatttctgtttgcaccatgtcttccaggagactagactactgttgtccagggtcaatttgagtgtaaagaaaatgtagacaaggaattgcccaattttaaattctgactttgctgacttaatttaaatgctcgttctgaaccaattttctcctatcttctctaggggtttcaaaagactcagttaattgatttccaggaagtactcatagcaagttcataaaagttcttgagacctaaatttcttcacaaaaaaagaaaagatcttaagtcatacattttaattgtgtagaggttgttcaactgaaggaataaatgtctattaaactaaaaaaaaaaaaaaaaaaaaaaaaaaaaa

SEQ ID NO: 1959 - DNA, 942 bp, Homo sapiens
tacgaatctcgcgagaagtcaagttctcatgagttctcccaaaatccaccgctcttcctctttccctaagcagcctgagggttgactggattggtgaggcccgtgtggctacttctgtggaagcagtgctgtagttactggaagataaaagggaaagcaagcccttggtgggggaaagtatggctgcgatgatggcatttcttaggacacctttggattaataatgaaaacaactactctctgagcagctgttcgaatcatctgatatttatactgaatgagttactgtaagtacgtattgacagaattacactgtactttcctctaggtgatctgtgaaaatggttcgctattcacttgacccggagaaccccacgaaatcatgcaaatcaagaggttccaatcttcgtgttcactttaagaacactcgtgaaactgctcaggccatcaagggtatgcatatacgaaaagccacgaagtatctgaaagatgtcactttacagaaacagtgtgtaccattccgacgttacaatggtggagttggcaggtgtgcgcaggccaagcaatggggctggacacaaggtcggtggcccaaaaagagtgctgaatttttgctgcacatgcttaaaaacgcagagagtaatgctgaacttaagggtttagatgtagattctctggtcattgagcatatccaagtgaacaaagcacctaagatgcgccgccggacctacagagctcatggtcggattaacccatacatgagctctccctgccacattgagatgatccttacggaaaaggaacagattgttcctaaaccagaagaggaggttgcccagaagaaaaagatatcccagaagaaactgaagaaacaaaaacttatggcacgggagtaaattcagcattaaaataaatgtaattaaaaggaaaaaaaaaaaaaaa

SEQ ID NO: 1960 - DNA, 646 bp, Homo sapiens
ctctttccctaagcagcctgaagtaatctgtgaaaatggttcgctattcacttgacccggagaaccccatgaaatcatgcaaatcaagaggttccaatcttcgtgttcactttaaggacactcgtgaaactgctcaggccatcaagggtatgcatatacgaaaagccacgaagtatcttaaagatgtcactttacagaaacagtgcataccattccgacgttacaatggtggagttggcaagtgtgcgcaggccaagcagtggggctggacacaaggtcggtggcccaaaaagagtgctgaatttttgctgcacatgtttaaaaacgcagagggtaatactgaacttaagggtttagatgtagattctctggtcattgagtatatccaagtgaacaaagcacctaagatgctccgccggacctacagagctcatggtcggattaactcatacatgagctctccctggcacattgagatgatccttactgaaaaggaacagattgttcctaaaccagaaaaggaggttgcccagaagaaaaagatatcccagaagaaactgaagaaacaaaaacttatggcccggaagtaaattcagcattaaaataaatgtaattaaaaggaaaaaaaaaaaaaaaaaaaaaaaaa

SEQ ID NO: 1961 - DNA, 648 bp, Homo sapiens
ctttccggacctggccgagcaggaggcgccatcatgggagtggacatccgccataacaaggaccgaaaggttcggcgcaaggagcccaagagccaggatatctacctgaggctgttggtcaagttatacaggtttctggccagaagaaccaactccacattcaaccaggttgtgttgaagaggttgtttatgagtcgcaccaaccggccgcctctgtccctttcccggatgatccggaagatgaagcttcctggccgggaaaacaagacggccgtggttgtggggaccataactgatgatgtgcgggttcaggaggtacccaaactgaaggtatgtgcactgcgcgtgaccagccgggcccgcagccgcatcctcagggcagggggcaagatcctcactttcgaccagctggccctggactcccctaagggctgtggcactgtcctgctctccggtcctcgcaagggccgagaggtgtaccggcatttcggcaaggccccaggaaccccgcacagccacaccaaaccctacgtccgctccaagggccggaagttcgagcgtgccagaggccgacgggccagccgaggctacaaaaactaaccctggatcctactctcttattaaaaagatttttgctgacaaaaaaaa

SEQ ID NO: 1962 - DNA, 618 bp, Homo sapiens
cttttgcgggtggcggcgaacgcggagagcacgccatgaaggcctcgggcacgctacgagagtacaaggtagtgggtcgctgcctgcccacccccaaatgccacacgccgcccctctaccgcatgcgaatctttgcgcctaatcatgtcgtcgccaagtcccgcttctggtactttgtatctcagttaaagaagatgaagaagtcttcaggggagattgtctactgtgggcaggtgtttgagaagtcccccctgcgggtgaagaacttcgggatctggctgcgctatgactcccggagcggcacccacaacatgtaccgggaataccgggacctgaccaccgcaggcgctgtcacccagtgctaccgagacatgggtgcccggcaccgcgcccgagcccactccattcagatcatgaaggtggaggagatcgcggccagcaagtgccgccggccggctgtcaagcagttccacgactccaagatcaagttcccgctgccccaccgggtcctgcgccgtcagcacaagccacgcttcaccaccaagaggcccaacaccttcttctaggtgcagggccctcgtccgggtgtgccccaaataaactcaggaacgccccggt

SEQ ID NO: 1963 - DNA, 698 bp, Homo sapiens
ctttcctttcgctgctgcggccgcagccatgagtatgctcaggcttcagaagaggctcgcctctagtgtcctccgctgtggcaagaagaaggtctggttagaccccaatgagaccaatgaaatcgccaatgccaactcccgtcagcagatccggaagctcatcaaagatgggctgatcatccgcaagcctgtgacggtccattcccgggctcgatgccggaaaaacaccttggcccgccggaagggcaggcacatgggcataggtaagcggaagggtacagccaatgcccgaatgccagagaaggtcacatggatgaggagaatgaggattttgcgccggctgctcagaagataccgtgaatctaagaagatcgatcgccacatgtatcacagcctgtacctgaaggtgaaggggaatgtgttcaaaaacaagcggattctcatggaacacatccacaagctgaaggcagacaaggcccgcaagaagctcctggctgaccaggctgaggcccgcaggtctaagaccaaggaagcacgcaagcgccgtgaagagcgcctccaggccaagaaggaggagatcatcaagactttatccaaggaggaagagaccaagaaataaaacctcccactttgtctgtacatactggcctctgtgattacatagatcagccattaaaataaaacaagccttaatctgc

SEQ ID NO: 1964 - DNA, 582 bp, Homo sapiens
tttcctttcggccggaaccgccatcttccagtaattcgccaaaatgacgaacacaaagggaaagaggagaggcacccgatatatgttctctaggccttttagaaaacatggagttgttcctttggccacatatatgcgaatctataagaaaggtgatattgtagacatcaagggaatgggtactgttcaaaaaggaatgccccacaagtgttaccatggcaaaactggaagagtctacaatgttacccagcatgctgttggcattgttgtaaacaaacaagttaagggcaagattcttgccaagagaattaatgtgcgtattgagcacattaagcactctaagagccgagatagcttcctgaaacgtgtgaaggaaaatgatcagaaaaagaaagaagccaaagagaaaggtacctgggttcaactaaagcgccagcctgctccacccagagaagcacactttgtgagaaccaatgggaaggagcctgagctgctggaacctattccctatgaattcatggcataataggtgttaaaaaaaaaaataaaggacctctgggctacaaaaaaaaaaaaaaaaaa

SEQ ID NO: 1965 - DNA, 594 bp, Homo sapiens
ggccacgtgaggagggtgggcggggcgttaaagttcatatcccagtgtcctttgaatcgacttccttttttcttttttccggcgttcaagatgtcgaagcgaggacgtggtgggtcctctggtgcgaaattccggatttccttgggtcttccggtaggagctgtaatcaattgtgctgacaacacaggagccaaaaacctgtatatcatctccgtgaaggggatcaagggacggctgaacagacttcccgctgctggtgtgggtgacatggtgatggccacagtcaagaaaggcaaaccagagctcagaaaaaaggtacatccagcagtggtcattcgacaacgaaagtcataccgtagaaaagatggcgtgtttctttattttgaagataatgcaggagtcatagtgaacaataaaggcgagatgaaaggttctgccattacaggaccagtagcaaaggagtgtgcagacttgtggccccggattgcatccaatgctggcagcattgcatgattctccagtatatttgtaaaaaataaaaaaaaaaactaaacccattaaaaagtatttgtttgcaaaaaaaaaaaaaaaaaa

SEQ ID NO: 1966 - DNA, 979 bp, Homo sapiens
agcattggagacccttttcacaagatggcgccgaaagcgaagaaggaagctcctgcccctcctaaagctgaagccaaagcgaaggctttaaaggccaagaaggcagtgttgaaaggtgtccacagccacaaaaagaagaagatccgcacgtcacccaccttccggcggccgaagacactgcgactccggagacagcccaaatatcctcggaagagcgctcccaggagaaacaagcttgaccactatgctatcatcaagtttccgctgaccactgagtctgccatgaagaagatagaagacaacaacacacttgtgttcattgtggatgttaaagccaacaagcaccagattaaacaggctgtgaagaagctgtatgacattgatgtggccaaggtcaacaccctgattcggcctgatggagagaagaaggcatatgttcgactggctcctgattacgatgctttggatgttgccaacaaaattgggatcatctaaactgagtccagctgcctaattctgaatatatatatatatatatcttttcaccatatacatgcctgtctgtcaatttctggttgggctgggaggccacacacacacactgacatgacagggcttgggcaagactcctgttctacttatccttttgaaatacctcaccctgccactccaccatgtatgatcattccagagatctttgtgactagagttagtgtcctaggaaaaccagaactcagaacttgcctccatggttgagtaacaagctgtacaagaaccccttttatccctggaagaggctgtgtatgaaaccaatgcccagggtttgaagggtgttagcatccatttcaggggagtgtggattggctggctctctggtagcattttgtcctcacacacccatctactatgtccaaccggtctgtctgcttccctcaccccttgcccaataaaggacaaggacttcagaggaaaaaaaaaa

SEQ ID NO: 1967 - DNA, 579 bp, Homo sapiens
tctttcttttcgccatcttttgtctttccgtggagctgtcgccatgaaggtcgagctgtgcagttttagcgggtacaagatctaccccggacacgggaggcgctacgccaggaccgacgggaaggttttccagtttcttaatgcgaaatgcgagtcggctttcctttccaagaggaatcctcggcagataaactggactgtcctctacagaaggaagcacaaaaagggacagtcggaagaaattcaaaagaaaagaacccgccgagcagtcaaattccagagggccattactggtgcatctcttgctgatataatggccaagaggaatcagaaacctgaagttagaaaggctcaacgagaacaagctatcagggctgctaaggaagcaaaaaaggctaagcaagcatctaaaaagactgcaatggctgctgctaaggcacctacaaaggcagcacctaagcaaaagattgtgaagcctgtgaaagtttcagctccccgagttggtggaaaacgctaaactggcagattagatttttaaataaagattggattataactctagaaaaaaaaaaaaaaaaa

SEQ ID NO: 1968 - DNA, 602 bp, Homo sapiens
ataggtctcgcgagatctttggtaaacttacagaaccggaagcagcgtgtagttctcttcccttttgcggccatcaccgaagcgggagcggccaaaatgaagtttaatccctttgtgacttccgaccgaagcaagaatcgcaaaaggcatttcaatgcaccttcccacattcgaaggaagattatgtcttcccctctttccaaagagctgagacagaagtacaacgtgcgatccatgcccatccgaaaggatgatgaagttcaggttgtacgtggacactataaaggtcagcaaattggcaaagtagtccaggtttacaggaagaaatatgttatctacattgaacgggtgcagcgggaaaaggctaatggcacaactgtccacgtaggcattcaccccagcaaggtggttatcactaggctaaaactggacaaagaccgcaaaaagatcctcgaacggaaagccaaatctcgccaagtaggaaaggaaaagggcaaatacaaggaagaaaccattgagaagatgcaggaataaagtaatcttatatacaagctttgattaaaacttgaaacaaagagcctgaaaaaaaaaaaaaaaaaaaa

SEQ ID NO: 1969 - DNA, 514 bp, Homo sapiens
tccttctttcctttttgctggtagggccgggtggttgctgccgaaatgggcaagttcatgaaacctgggaaggtggtgcttgtcctggctggacgctactccggacgcaaagctgtcatcgtgaagaacattgatgatggcacctcagatcgcccctacagccatgctctggtggctggaattgaccgctacccccgcaaagtgacagctgccatgggcaagaagaagatcgccaagagatcaaagataaaatcttttgtgaaagtgtataactacaatcacctaatgcccacaaggtactctgtggatatccccttggacaaaactgtcgtcaataaggatgtcttcagagatcctgctcttaaacgcaaggcccgacgggaggccaaggtcaagtttgaagagagatacaagacaggcaagaacaagtggttcttccagaaactgcggttttagatgctttgttttgatcattaaaaattataaagaaaaaaaaaaaaaaaaaaaaaaaaaa

SEQ ID NO: 1970 - DNA, 3950 bp, Homo sapiens; identical to SEQ ID NO: 1953

SEQ ID NO: 1971 - DNA, 2188 bp, Homo sapiens; identical to SEQ ID NO: 1954

SEQ ID NO: 1972 - DNA, 719 bp, Homo sapiens; identical to SEQ ID NO: 1955

SEQ ID NO: 1973 - DNA, 609 bp, Homo sapiens; identical to SEQ ID NO: 1956

SEQ ID NO: 1974 - DNA, 1142 bp, Homo sapiens; identical to SEQ ID NO: 1957

SEQ ID NO: 1975 - DNA, 2018 bp, Homo sapiens; identical to SEQ ID NO: 1958

SEQ ID NO: 1976 - DNA, 942 bp, Homo sapiens; identical to SEQ ID NO: 1959

SEQ ID NO: 1977 - DNA, 646 bp, Homo sapiens; identical to SEQ ID NO: 1960

SEQ ID NO: 1978 - DNA, 648 bp, Homo sapiens; identical to SEQ ID NO: 1961

SEQ ID NO: 1979 - DNA, 618 bp, Homo sapiens; identical to SEQ ID NO: 1962

SEQ ID NO: 1980 - DNA, 698 bp, Homo sapiens; identical to SEQ ID NO: 1963

SEQ ID NO: 1981 - DNA, 582 bp, Homo sapiens; identical to SEQ ID NO: 1964

SEQ ID NO: 1982 - DNA, 594 bp, Homo sapiens; identical to SEQ ID NO: 1965

SEQ ID NO: 1983 - DNA, 979 bp, Homo sapiens; identical to SEQ ID NO: 1966

SEQ ID NO: 1984 - DNA, 579 bp, Homo sapiens; identical to SEQ ID NO: 1967

SEQ ID NO: 1985 - DNA, 602 bp, Homo sapiens; identical to SEQ ID NO: 1968

SEQ ID NO: 1986 - DNA, 514 bp, Homo sapiens; identical to SEQ ID NO: 1969

SEQ ID NO: 1987 - DNA, 4906 bp, Homo sapiens
aacgaggcccttagggtcggcttaggcggttccctgaccaaggcgccagaaaagggcctggctcaagcaagcacgggcggcgtgcagtacagcacacctagccccgattcttcaacagttctcgccctccgagcctagcacaacgagcctcaccgaaaccgtacaccgccaccaggacactccgtgatgggggatcaccaccctcagaaagaggaagcgactagcaggcgcgcaatcccgcgagaccaggaggccccgcccgaagcccggcctctgtgaccggaagtgaggcgttttgccccgcccccgtggccgatacctcgcgagacttggcgaaggccttcctttttcgtctgggctgccaacatgccatccagactgaggaagacccggaaacttaggggccacgtgagccacggccacggccgcataggcaagcaccggaagcaccccggcggccgcggtaatgctggtggtctgcatcaccaccggatcaacttcgacaaataccacccaggctactttgggaaagttggtatgaagcattaccacttaaagaggaaccagagcttctgcccaactgtcaaccttgacaaattgtggactttggtcagtgaacagacacgggtgaatgctgctaaaaacaagactggggctgctcccatcattgatgtggtgcgatcgggctactacaaagttctgggaaagggaaagctcccaaagcagcctgtcatcgtgaaggccaaattcttcagcagaagagctgaggagaagattaagagtgttgggggggcctgtgtcctggtggcttgaagccacatggagggagtttcattaaatgctaactactttttccttgtggtgtgagtgtaggttcttcagtggcacctctacatcctgtgtgcattgggagcccaggttctagtacttagggtatgaagacatggggtcctctcctgacttccctcaaatatatggtaaacgtaagaccaacacagacgttggccagttaaacatttctgtttataaagtcagaataatacctgttgatcactgaaaggcctgcatgtattgtactctgaattttacagtgaatgagagaatgtaccctaattgttcaacagggctcaaaaggaaagattccattttgatgggtcacattctaaagaggggcagtgtgataggaatgagatggtcctttaggacttaagttctcagcccaaggtttttccacgtggccccctcatcttttttttttttttaaacggagtctctcttgccaggctggagtgcagtggcacgatctcggctcactgcagcctccgcctcccaggttaagcgattctcctgcctcagcttcctgactaactgggattacaggcgcccaccaccatgcccagctaatttttgtattttcagtagagatggggtttcaccatgttggccatgctggtctctaactcctaacctcaagtgatctgcccacatcggcctccaaaagttctgggattatagtgtgagccactgcgcccggccatggctccttaatcttgatccaaattattgttacatccagaatgtgatgaatcaaaatctcgagatgggggtccagcaatctgaaatttcagtatgccagggcttttctgtatgtcaaagtgggtttgaaatagttaatttttcttctagtctgaaatgtatcgggaaaatttggaaatcctgaaggctggaaattgaaataagtttttctaggatttgtgtctcttgctattggaaaactgatggtgaccaattcatgtttacaaataagatcctcatagatctcggtaaattataatttgctacagttttatggttcttcctgtgattttgagctttttttgacccaaaataatacagtctaaaactatagacaaataagatggcacttagactcctgggttttagttagtggaggtttccttagtgcactgtggggtcataataagccgagaaccatggctgtctatgggacacatctgtcaggacaacctttagaggatgttggggatcaaatagaaggcacagagaagcactgaattggcttacataagaataggctagaattacaagtagtgaaacctcgattcagctggacaattttaaacaaatgtatcatttggcttgtatcttctgttgtgctggagaagttagaaataagggctctccagaccagcctgaccaacctggagaaaccttgtctctactaaatacacaaaattagccaggcgtggtggcacatgcctgtaatcccagctactttggaggctgagccaggagaatctccaggaggcggaggttgctgtgagccgagatcgtgccattgcactccagcttgggcaacaagagtgaaactctgtccaccccccccaaaaaaagtaagggctctccattagggcccatagaggacttgtaatatggaacctgaatccaaggatcccacaataagtggtcagtagttcatgatgaattaaaagactcaatatttggtcttcacccaatacctgtgtgacttttagtcctaatttcctcatctttaaaatttcagtgaaagtgcctacctgaggattgtgtagattaaaatggaaaccgtgcacttaattttttgttttgttttgagacggagtctcgctctgtcgcccaggctggagtgcagtggtgcgatctcagatcactgcaagctccgcctcctaggttcagaccattctcctgcctcagcttcccaagtagctgggactacaggcgcccgccactgcgcccggctaattttttgcatttttagtagagacagggtttcaccgtgttagccaggatggtctcgatctcctgatctgcccgcctcagcctcccaaagtgctgggattacaggcatgagccaccgcgcccggcccaggcacttaatttttgtgtttgacttagtaacttaagtgcaaactattacgggagcagatggagtcaattggccttcatgtgattgtcagtgggaaattggtccaagcagagggaatactggttcaggaaactggtttgggaaggttaggcaaacgggaagtgctatggtggagagaaagattactctggccgggctgtaaaggacggctacaatgggaggctgaaggcagaaccaagaaaatgggagtgagtatggaaaaggtacgattcagacggcataatggacgggacttggagactgaattgtagtgggccgaccacaaaatgataaggcatggaaggaagtagagtttggggggaaggatccctagtcccttaatggctaccttcttccccaggagttgttaggccatccgatcccctggcctgggaaagaaacactgatttcgttgctggcttgttcactcaccagaagctacagctactaacagttctaaaaactgtttcatgtgatgaggaacagacgaaaatagttttgagccctaagtccgccgattccagtgctttcttgaacccgcatttactaaaatattttcatgactgccaagctttgaatagcctgctgtgttcatggaggctcatactggcgatctctagtggctggctaaagcttgaattgcaaaagatctaatttctggtctaatgtatatatgccttaaatatagttgcgttcaaacgtgggagctgcaggtgcaacttgattttatgacaaatggctgccacataatttgcacaagcagtgctcgtcaagggcagctaaatcaggcgagctttcaatcaaaataaatgtactactaaaccctacttagcggctaactagcccaagagcagacagcccacggacggactgcaagtcggaagcgcgggcggaagctgtgcagcgcccacctggtggctccatcggccgcgttcatcagtcagcacgacccgacctcagtggcgtcctcacaacacagaccggaccttgggtcttaccccggcacctgagaaccacttccggtgagtagcttctacttccggagacgatgactcccccgcgtcccagaccggaagaagcccggcggagaccggcctcgctcggccacttccggcaagggcggagccggccagtggtgcgcgagcgcagataactcccctggagaggcgggatgttcaactccacccctggtccttgggcggccgtgggtccccttcgaagcggaggaatggccaacctcgccgcacttcgagcccctttagggtgcgtttaagaacagtgggcgtggcctttacgtaaatcttcgagatgggaacctccagaatttgtctcaattgtctaaaaggtaatgagcgtcagcgacattcaagggcactttgggctaaaaaagaaagtgcttgtacacggatggaaatattctagaagaacataaaaggaatttcctcttaggaggttagggaaatgagcacgaagtatgttttggtgcagttttttgttcaacccaatgcgtattttcatattgagaggcaatataaatggagcgaaagtatcttgagaaaaaaaaaaaaactaccagaacttgccgttgctgaaaagtaatattttctctttcgagagttttcatggccttttaaattacacccccacctccacaggcaaataaatttgttttggaatgcataccacatcatctggctctagaaacgtattttgtgtagctcccctagcaagaatataggttaaagcgtaaatttaattcctggctctattttacatcccaatttttattttcctctcattcccactttacgttgtttcaaataacctagtttgtgtatccctgtaagtcattttggtataaagtaggttataagtgtacatgcgaaaagatgtttttaacaaaaatgtaactgaaaaaaaaaaaaaaaaaaaaaaaaaaaa

SEQ ID NO: 1988 - DNA, 1348 bp, Homo sapiens
ccagatttggctttatatagcggacccgtaaggccgaccggcctctaccggcgggatttgatggcgtgatgtctcacagaaagttctccgctcccagacatgggtccctcggcttcctgcctcggaagcgcagcagcaggcatcgtgggaaggtgaagagcttccctaaggatgacccgtccaagccggtccacctcacagccttcctgggatacaaggctggcatgactcacatcgtgcgggaagtcgacaggccgggatccaaggtgaacaagaaggaggtggtggaggctgtgaccattgtagagacaccacccatggtggttgtgggcattgtgggctacgtggaaacccctcgaggcctccggaccttcaagactgtctttgctgagcacatcagtgatgaatgcaagaggcgtttctataagaattggcataaatctaagaagaaggcctttaccaagtactgcaagaaatggcaggatgaggatggcaagaagcagctggagaaggacttcagcagcatgaagaagtactgccaagtcatccgtgtcattgcccacacccagatgcgcctgcttcctctgcgccagaagaaggcccacctgatggagatccaggtgaacggaggcactgtggccgagaagctggactgggcccgcgagaggcttgagcagcaggtacctgtgaaccaagtgtttgggcaggatgagatgatcgacgtcatcggggtgaccaagggcaaaggctacaaaggggtcaccagtcgttggcacaccaagaagctgccccgcaagacccaccgaggcctgcgcaaggtggcctgtattggggcatggcatcctgctcgtgtagccttctctgtggcacgcgctgggcagaaaggctaccatcaccgcactgagatcaacaagaagatttataagattggccagggctaccttatcaaggacggcaagctgatcaagaacaatgcctccactgactatgacctatctgacaagagcatcaaccctctgggtggctttgtccactatggtgaagtgaccaatgactttgtcatgctgaaaggctgtgtggtgggaaccaagaagcgggtgctcaccctccgcaagtccttgctggtgcagacgaagcggcgggctctggagaagattgaccttaagttcattgacaccacctccaagtttggccatggccgcttccagaccatggaggagaagaaagcattcatgggaccactgaagaaagaccgaattgcaaaggaagaaggagcttaatgccaggaacagattttgcagttggtggggtctcaataaaagttattttccactgacaaaaaaaaaaa

SEQ ID NO: 1989 - DNA, 524 bp, Homo sapiens
cctttctcgttccccggccatcttagcggctgctgttggttgggggccgtcccgctcctaaggcaggaagatggtggccgcaaagaagacgaaaaagtcgctggagtcgatcaactctaggctccaactcgttatgaaaagtgggaagtacgtcctggggtacaagcagactctgaagatgatcagacaaggcaaagcgaaattggtcattctcgctaacaactgcccagctttgaggaaatctgaaatagagtactatgctatgttggctaaaactggtgtccatcactacagtggcaataatattgaactgggcacagcatgcggaaaatactacagagtgtgcacactggctatcattgatccaggtgactctgacatcattagaagcatgccagaacagactggtgaaaagtaaaccttttcacctacaaaatttcacctgcaaaccttaaacctgcaaaattttcctttaataaaatttgcttgttttaaaaacattgtaaaaaaaaaaaaaaaaaaaa

SEQ ID NO: 1990 - DNA, 524 bp, Homo sapiens
tggcgacccggaagttgtacttgcaactgcggctttccttctcccacaatccttcgcgctcttcctttccaacttggacgctgcagaatggctcccgcaaagaagggtggcgagaagaaaaagggccgttctgccatcaacgaagtggtaacccgagaatacaccatcaacattcacaagcgcatccatggagtgggcttcaagaagcgtgcacctcgggcactcaaagagattcggaaatttgccatgaaggagatgggaactccagatgtgcgcattgacaccaggctcaacaaagctgtctgggccaaaggaataaggaatgtgccataccgaatccgtgtgcggctgtccagaaaacgtaatgaggatgaagattcaccaaataagctatatactttggttacctatgtacctgttaccactttcaaaaatctacagacagtcaatgtggatgagaactaatcgctgatcgtcagatcaaataaagttataaaattgccttcaaaaaaaaaaaaaaaaaa

SEQ ID NO: 1991 - DNA, 1787 bp, Homo sapiens
gacctcctgggatcgcatctggagagtgcctagtattctgccagcttcggaaagggagggaaagcaagcctggcagaggcacccattccattcccagcttgctccgtagctggcgattggaagacactctgcgacagtgttcagtccctgggcaggaaagcctccttccaggattcttcctcacctggggccgcttcttccccaaaaggcatcatggccgccctcagaccccttgtgaagcccaagatcgtcaaaaagagaaccaagaagttcatccggcaccagtcagaccgatatgtcaaaattaagcgtaactggcggaaacccagaggcattgacaacagggttcgtagaagattcaagggccagatcttgatgcccaacattggttatggaagcaacaaaaaaacaaagcacatgctgcccagtggcttccggaagttcctggtccacaacgtcaaggagctggaagtgctgctgatgtgcaacaaatcttactgtgccgagatcgctcacaatgtttcctccaagaaccgcaaagccatcgtggaaagagctgcccaactggccatcagagtcaccaaccccaatgccaggctgcgcagtgaagaaaatgagtaggcagctcatgtgcacgttttctgtttaaataaatgtaaaaactgccatctggcatcttccttccttgattttaagtcttcagcttcttggccaacttagtttgccacagagattgttcttttgcttaagcccctttggaatctcccatttggaggggatttgtaaaggacactcagtccttgaacaggggaatgtggcctcaagtgcacagactagccttagtcatctccagttgaggctgggtatgaggggtacagacttggccctcacaccaggtaggttctgagacacttgaagaagcttgtggctcccaagccacaagtagtcattcttagccttgcttttgtaaagttaggtgacaagttattccatgtgatgcttgtgagaattgagaaaatatgcatggaaatatccagatgaatttcttacacagattcttacgggatgcctaaattgcatcctgtaacttctgtccaaaaagaacaggatgatgtacaaattgctcttccaggtaatccaccacggttaactggaaaagcactttcagtctcctataaccctcccaccagctgctgcttcaggtataatgttacagcagtttgccaaggcggggacctaactggtgacaattgagcctcttgactggtactcagaatttagtgacacgtggtcctgattttttttggagacggggtcttgctctcacccaggctgggagtgcagtggcacactgactacagccttgacctccccaggctcaggtgatcttcccacctcagccttccaagtagctgggactacagatgcacacctccaaacctgggtagtttttgaagtttttttgtagaggtggtctagccatgttgcctaggctcccgaactcctgagctcaagcaatcctgcttcagcctcccaaagtactgggattacaggcatcttctgtagtatataggtcatgagggatatgggatgtggtacttatgagacagaaatgcttacaggatgtttttctgtaaccatcctggtcaacttagcagaaatgctgcgctgggtataataaagcttttctacttctagtctagacaggaatcttacagattgtctcctgttcaaaacctagtcataaatatttataatgcaaactggtcaaaaaaaaaaaaaaaaaa

SEQ ID NO: 1992 - DNA, 918 bp, Homo sapiens
cttttttcttcctcttccggggacgttgtctgcaggcactcagaatggtccagcgtttgacataccgacgtaggctttcctacaatacagcctctaacaaaactaggctgtcccgaacccctggtaatagaattgtttacctttataccaagaaggttgggaaagcaccaaaatctgcatgtggtgtgtgcccaggcagacttcgaggggttcgtgctgtaagacctaaagttcttatgagattgtccaaaacaaagaaacatgtcagcagggcctatggtggttccatgtgtgctaaatgtgttcgtgacaggatcaagcgtgctttccttatcgaggagcagaaaatcgttgtgaaagtgttgaaggcacaagcacagagtcagaaagctaaataaaaaaatgaaacttttttgagtaataaaaatgaaaagacgctgtccaatagaaaaagttggtgtgctggagctacctcacctcagcttgagagagccagttgtgtgcatctctttccagttttgcatccagtgacgtctgcttggcatcttgagattgttatggtgagagtatttacacctcagcaaatgctgcaaaatcctgttttcccccagagagctggaggttaaatactaccagcacatccctagatactactcaagttacagtatatgatcactaatatagtatgctcttggtaccaggagctctgatatatatctggtacatgtttgataatgacttgattgttattataagtacttattaatacttcgattctgtaaagagtttagggtttgattttataaaatccaaaatgagccttttattgaatccagttctctatgtgaccagttctctgtatgaatggaagggaaaagaattaaaaatcttgcaaaggggaaaaaaaaaaaaaaaaaa

SEQ ID NO: 1993 - DNA, 511 bp, Homo sapiens
ggcctcgtccttctcttaccgccatcttggctcctgtggaggcctgctgggaacgggacttctaaaaggaactatgtctggaaggctgtggtccaaggccatttttgctggctataagcggggtctccggaaccaaagggagcacacagctcttcttaaaattgaaggtgtttacgcccgagatgaaacagaattctatttgggcaagagatgcgcttatgtatataaagcaaagaacaacacagtcactcctggcggcaaaccaaacaaaaccagagtcatctggggaaaagtaactcgggcccatggaaacagtggcatggttcgtgccaaattccgaagcaatcttcctgctaaggccattggacacagaatccgagtgatgctgtacccctcaaggatttaaactaacgaaaaatcaataaataaatgtggatttgtgctcttgtatttttaagtggattaaaaaacttactaccttaaaaaaaaaaaaaaaaaaaaaaaaaaaaaa

SEQ ID NO: 1994 - DNA, 469 bp, Homo sapiens
gaggaagtgcgatcgggaacctcctatatacttccgtttgcctcgcggtttctttctttccgcgccgatagcgctcacgcaagcatggttaacgtccctaaaacccgccggactttctgtaagaagtgtggcaagcaccaaccccataaagtgacacagtacaagaagggcaaggattctctgtacgcccagggaaagcggcgttatgacaggaagcagagtggctatggtgggcaaactaagccgattttccggaaaaaggctaaaactacaaagaagattgtgctaaggcttgagtgcgttgagcccaactgcagatctaagagaatgctggctattaaaagatgcaagcattttgaactgggaggagataagaagagaaagggccaagtgatccagttctaagtgtcatcttttattatgaagacaataaaatcttgagtttatgttcaaaaaaaaaaaaaaaaaa

SEQ ID NO: 1995 - DNA, 1586 bp, Homo sapiens
gcgccccgcaggaagtgcttccctgggcggaagcttctgagcgtgatatagcggaagtgccttctcttccggtctttctggtctcggccgcagaagcgagatgacgaagggaacgtcatcgtttggaaagcgtcgcaataagacgcacacgttgtgccgccgctgtggctctaaggcctaccaccttcagaagtcgacctgtggcaaatgtggctaccctgccaagcgcaagagaaagtataactggagtgccaaggctaaaagacgaaataccaccggaactggtcgaatgaggcacctaaaaattgtataccgcagattcaggcatggattccgtgaaggaacaacacctaaacccaagagggcagctgttgcagcatccagttcatcttaagaatgtcaacgattagtcatgcaataaatgttctggttttaaaaaatacatatctggttttggtaaggtatttttaatcaattaggcttgtagtatcagtgaaatactgtaggtttagggactgggctagcttcatatcagatttacttgttaagtgactgttttggaatgtttacttttggactgggtttgtaacacggttaaaggcaatgagaaacaagcagaattccaggagtccttgaagcagagggcactggaagacaatatagcagattaaaatagcacagctcatgtggcataggtgggtattttagatgtttgagtaaatttgaaagagtatgatgtttaaattacctttagcaacatgttcatctgctatgctgtcatgactagggggatgattattagtcacatagagcttgggagtaccactggaaacgtatgggtaggagtttaggtggcttctgtttttcaaaagatgatcttatcctagtatctgtaatgctcacttggcacacctgacttgtgggctgtgtgtaaggtggctagctaagtgaaaaaagcctgctaggtgtgagtcaacttaagaatatgtaaataggtttgagaaaaagtagggcttgggtgcaagtaaagattgagcaggaaataaaggaaaatcaagtataatccctgagatttgtagactaaaggcaatgatgtgggactacttggtcgaatttttttagccctcaacttggtaattgggtgtttctgtgttaaagcactgaaacttgctgtcgtgccttcctagttttcgtggtttattgacagggttgggggttttttttgtttttttaaaatgaagggacaaagtcaactggactgctgagtgagagggcaggggcagttgaagggaacatgaattgctggaacagctacataaaatagtgatgtagccaagtcatgctatttaaattataattctccactgtgtttagaataacatctgaggttcttaacctggccttggaagggtatcacttttacttgtaacctggaatggctttataatgtgctagctaattgctactctcatcttgtattttaactcctaatttacccttcaggtctcagcttcagaacattcacttataaagaaaccctgctgattaaatctctcttgggcttcctcccaaaaaaaaaaaaaaaa

SEQ ID NO: 1996 - DNA, 434 bp, Homo sapiens
acttccgctcgtccgcctaataccgcgcctgcgcaccgcgtctcttcctttctgggctcggacctaggtcgcggcgacatggccaaacgtaccaagaaagtcgggatcgtcggtaaatacgggacccgctatggggcctccctccggaaaatggtgaagaaaattgaaatcagccagcacgccaagtacacttgctctttctgtggcaaaaccaagatgaagagacgagctgtggggatctggcactgtggttcctgcatgaagacagtggctggcggtgcctggacgtacaataccacttccgctgtcacggtaaagtccgccatcagaagactgaaggagttgaaagaccagtagacgctcctctactctttgagacatcactggcctataataaatgggttaatttatgtaacaaaaaaaaaaaaaaaaaa

SEQ ID NO: 1997 - DNA, 376 bp, Homo sapiens
gcccggaaacggaagtctcgttctttttcgtccttttccccggttgctgcttgctgtcctggtccgcgccagagcccagcgcgcctcgtcgccatgcctcggaaaattgaggaaatcaaggacttcctgctcacagcccgacgaaaggatgccaaatctgtcaagatcaagaaaaataaggacaacgtgaagtttaaagttcgatgcagcagatacctttacaccctggtcatcactgacaaagagaaggcagagaaactgaagcagtccctgccccccggtttggcagtgaaggaactgaaatgaaccagacacactgattggaactgtattatattaaaatactaaaaatcctaaaaaaaaaaaaaaaaaaaaa

SEQ ID NO: 1998 - DNA, 1547 bp, Homo sapiens
ggcggctagcggcgaggccccttcctgaccttcagggatcggccaccatgtcccaccggaagttttccgcccctcggcacggacacctgggcttcctgccccataagaggagccaccggcaccggggcaaggtgaagacgtggccgcgggatgaccccagccagcccgtgcacctcacggccttcctgggctacaaggcgggcatgacccacaccctgcgggaggtgcaccggccggggctcaaaatttccaaacgggaggaggtggaggcggtgacaattgtagaaacgccgcccctagtggtggtgggcgtggtgggctacgtggccacccctcgaggtctccggagcttcaagaccatctttgcagaacacctcagtgatgagtgccggcgccgattctacaaggactggcacaagagcaagaagaaagccttcaccaaggcctgcaagaggtggcgggacacagacgggaaaaagcagctacagaaggacttcgccgccatgaagaagtactgcaaggtcattcgggtcattgtccacactcagatgaaactgctgcccttccggcagaagaaggcccacatcatggagatccagctgaacggtggcacggtggccgagaaggtggcctgggcccaggcccggctggagaagcaggtgcccgtgcacagcgtgttcagccagagtgaggtcattgatgtcattgctgtcaccaagggtcgaggcgtcaaaggggtcacaagccgctggcataccaagaagctgccgcggaagacccataagggcctgcgcaaggtggcctgcattggcgcctggcaccccgcccgcgtgggctgctccattgctcgggccgggcagaagggctatcaccaccgcacggagctcaacaagaagatcttccgcatcggcaggggcccgcacatggaggacgggaagctggtgaagaacaatgcatccaccagctacgacgtgactgccaagtccatcacaccgctgggtggcttcccccactacggggaagtgaacaacgacttcgtcatgctgaagggttgtattgctggtaccaagaagcgggtcattacgctgagaaagtccctcctggtgcatcacagtcgccaagccgtggagaatattgagctcaagttcattgacaccacctccaagttcggccatggccgcttccagacagcccaagagaagagggccttcatgggcccccaaaagaagcatctggagaaggaaacgccggagacctcgggagacttgtaggctgtgtggggtggatgaaccctgaagcgcaccgcactgtctgccccaatgtctaacaaaggccggaggcgactcttcctgcgaggtctcagagcgctgtgtaaccgcccaaggggttcaccttgcctgctgcctagacaaagccgattcattaagacaggggaattgcaatagagaaagagtaattcacacagagctggctgtgcgggagaccggagttttatgttttattattactcaaatcgatctctttgagcaaaaaaaaaaaaaaaaaaa

SEQ ID NO: 1999 - DNA, 1449 bp, Homo sapiens
cttttcctgtggcagcagccgggctgagaggagcgtggctgtctcctctctccgccatggcgtgtgctcgcccactgatatcggtgtactccgaaaagggggagtcatctggcaaaaatgtcactttgcctgctgtattcaaggctcctattcgaccagatattgtgaactttgttcacaccaacttgcgcaaaaacaacagacagccctatgctgtcagtgaattagcaggtcatcagactagtgctgagtcttggggtactggcagagctgtggctcgaattcccagagttcgaggtggtgggactcaccgctctggccagggtgcttttggaaacatgtgtcgtggaggccgaatgtttgcaccaaccaaaacctggcgccgttggcatcgtagagtgaacacaacccaaaaacgatacgccatctgttctgccctggctgcctcagccctaccagcactggtcatgtctaaaggtcatcgtattgaggaagttcctgaacttcctttggtagttgaagataaagttgaaggctacaagaagaccaaggaagctgttttgctccttaagaaacttaaagcctggaatgatatcaaaaaggtctatgcctctcagcgaatgagagctggcaaaggcaaaatgagaaaccgtcgccgtatccagcgcaggggcccgtgcatcatctataatgaggataatggtatcatcaaggccttcagaaacatccctggaattactctgcttaatgtaagcaagctgaacattttgaagcttgctcctggtgggcatgtgggacgtttctgcatttggactgaaagtgctttccggaagttagatgaattgtacggcacttggcgtaaagccgcttccctcaagagtaactacaatcttcccatgcacaagatgattaatacagatcttagcagaatcttgaaaagcccagagatccaaagagcccttcgagcaccacgcaagaagatccatcgcagagtcctaaagaagaacccactgaaaaacttgagaatcatgttgaagctaaacccatatgcaaagaccatgcgccggaacaccattcttcgccaggccaggaatcacaagctccgggtggataaggcagctgctgcagcagcggcactacaagccaaatcagatgagaaggcggcggttgcaggcaagaagcctgtggtaggtaagaaaggaaagaaggctgctgttggtgttaagaagcagaagaagcctctggtgggaaaaaaggcagcagctaccaagaaaccagcccctgaaaagaagcctgcagagaagaaacctactacagaggagaagaagcctgctgcataaactcttaaatttgattattccataaaggtcaaatcattttggacagcttcttttgaataaagacctgattatacaggcagtgagaaacatgaaaaaaaaaaaaaaaaaa

SEQ ID NO: 2000 - DNA, 1035 bp, Homo sapiens
ggcccttttcccaccccctagcgccgctgggcctgcaggtctctgtcgagcagcggacgccggtctctgttccgcaggatggggtttgttaaagttgttaagaataaggcctactttaagagataccaagtgaaatttagaagacgacgagagggtaaaactgattattatgctcggaaacgcttggtgatacaagataaaaataaatacaacacacccaaatacaggatgatagttcgtgtgacaaacagagatatcatttgtcagattgcttatgcccgtatagagggggatatgatagtctgcgcagcgtatgcacacgaactgccaaaatatggtgtgaaggttggcctgacaaattatgctgcagcatattgtactggcctgctgctggcccgcaggcttctcaataggtttggcatggacaagatctatgaaggccaagtggaggtgactggtgatgaatacaatgtggaaagcattgatggtcagccaggtgccttcacctgctatttggatgcaggccttgccagaactaccactggcaataaagtttttggtgccctgaagggagctgtggatggaggcttgtctatccctcacagtaccaaacgattccctggttatgattctgaaagcaaggaatttaatgcagaagtacatcggaagcacatcatgggccagaatgttgcagattacatgcgctacttaatggaagaagatgaagatgcttacaagaaacagttctctcaatacataaagaacagcgtaactccagacatgatggaggagatgtataagaaagctcatgctgctatacgagagaatccagtctatgaaaagaagcccaagaaagaagttaaaaagaagaggtggaaccgtcccaaaatgtcccttgctcagaagaaggatcgggtagctcaaaagaaggcaagcttcctcagagctcaggagcgggctgctgagagctaaacccagcaattttctatgattttttcagatatagataataaacttatgaacagcaactaaaaa

SEQ ID NO: 2001 - DNA, 972 bp, Homo sapiens
gattgcttatagaccggaagccgggaccttaattctctttcccatcttgcaagatggcgggtgaaaaagttgagaagccagatactaaagagaagaaacccgaagccaagaaggttgatgctggtggcaaggtgaaaaagggtaacctcaaagctaaaaagcccaagaaggggaagccccattgcagccgcaaccctgtccttgtcagaggaattggcaggtattcccgatctgccatgtattccagaaaggccatgtacaagaggaagtactcagccgctaaatccaaggttgaaaagaaaaagaaggagaaggttctcgcaactgttacaaaaccagttggtggtgacaagaacggcggtacccgggtggttaaacttcgcaaaatgcctagatattatcctactgaagatgtgcctcgaaagctgttgagccacggcaaaaaacccttcagtcagcacgtgagaaaactgcgagccagcattacccccgggaccattctgatcatcctcactggacgccacaggggcaagagggtggttttcctgaagcagctggctagtggcttattacttgtgactggacctctggtcctcaatcgagttcctctacgaagaacacaccagaaatttgtcattgccacttcaaccaaaatcgatatcagcaatgtaaaaatcccaaaacatcttactgatgcttacttcaagaagaagaagctgcggaagcccagacaccaggaaggtgagatcttcgacacagaaaaagagaaatatgagattacggagcagcgcaagattgatcagaaagctgtggactcacaaattttaccaaaaatcaaagctattcctcagctccagggctacctgcgatctgtgtttgctctgacgaatggaatttatcctcacaaattggtgttctaaatgtcttaagaacctaattaaatagctgactacaaaaaaaaaaaaaaaaaaa

SEQ ID NO: 2002 - DNA, 866 bp, Homo sapiens
tcctctttttccggctggaaccatggagggtgtagaagagaagaagaaggaggttcctgctgtgccagaaacccttaagaaaaagcgaaggaatttcgcagagctgaagatcaagcgcctgagaaagaagtttgcccaaaagatgcttcgaaaggcaaggaggaagcttatctatgaaaaagcaaagcactatcacaaggaatataggcagatgtacagaactgaaattcgaatggcgaggatggcaagaaaagctggcaacttctatgtacctgcagaacccaaattggcgtttgtcatcagaatcagaggtatcaatggagtgagcccaaaggttcgaaaggtgttgcagcttcttcgccttcgtcaaatcttcaatggaacctttgtgaagctcaacaaggcttcgattaacatgctgaggattgtagagccatatattgcatgggggtaccccaatctgaagtcagtaaatgaactaatctacaagcgtggttatggcaaaatcaataagaagcgaattgctttgacagataacgctttgattgctcgatctcttggtaaatacggcatcatctgcatggaggatttgattcatgagatctatactgttggaaaacgcttcaaagaggcaaataacttcctgtggcccttcaaattgtcttctccacgaggtggaatgaagaaaaagaccacccattttgtagaaggtggagatgctggcaacagggaggaccagatcaacaggcttattagaagaatgaactaaggtgtctaccatgattatttttctaagctggttggttaataaacagtacctgctctcaaattgaaataaaaaaaaaaaaaaaaaaaaaaaaaaaaaa

SEQ ID NO: 2003 - DNA, 890 bp, Homo sapiens
tttcctttctctctcctcccgccgcccaagatgccgaaaggaaagaaggccaagggaaagaaggtggctccggccccagctgtcgtgaagaagcaggaggctaagaaagtggtgaatcccctgtttgagaaaaggcctaagaattttggcattggacaggacatccagcccaaaagagacctcacccgctttgtgaaatggccccgctatatcaggttgcagcggcagagagccatcctctataagcggctgaaagtgcctcctgcgattaaccagttcacccaggccctggaccgccaaacagctactcagctgcttaagctggcccacaagtacagaccagagacaaagcaagagaagaagcagagactgttggcccgggccgagaagaaggctgctggcaaaggggacgtcccaacgaagagaccacctgtccttcgagcaggagttaacaccgtcaccaccttggtggagaacaagaaagctcagctggtggtgattgcacacgacgtggatcccatcgagctggttgtcttcttgcctgccctgtgtcgtaaaatgggggtcccttactgcattatcaagggaaaggcaagactgggacgtctagtccacaggaagacctgcaccactgtcgccttcacacaggtgaactcggaagacaaaggcgctttggctaagctggtggaagctatcaggaccaattacaatgacagatacgatgagatccgccgtcactggggtggcaatgtcctgggtcctaagtctgtggctcgtatcgccaagctcgaaaaggcaaaggctaaagaacttgccactaaactgggttaaatgtacactgttgagttttctgtacataaaaataattgaaataatacaaattttccttc

SEQ ID NO: 2004 - DNA, 967 bp, Homo sapiens
gcggcatgggcagtatccgccgccatcctcttccgtgaggcgcgctgagacccggaccggccctcctgagaggatgccggtgcgggcgcccgcggagagggacccgtcgccatgggccgtgtgatccgtggacagaggaagggcgccgggtctgtgttccgcgcgcacgtgaagcaccgtaaaggcgctgcgcgcctgcgcgccgtggatttcgctgagcggcacggctacatcaagggcatcgtcaaggacatcatccacgacccgggccgcggcgcgcccctcgccaaggtggtcttccgggatccgtatcggtttaagaagcggacggagctgttcattgccgccgagggcattcacacgggccagtttgtgtattgcggcaagaaggcccagctcaacattggcaatgtgctccctgtgggcaccatgcctgagggtacaatcgtgtgctgcctggaggagaagcctggagaccgtggcaagctggcccgggcatcagggaactatgccaccgttatctcccacaaccctgagaccaagaagacccgtgtgaagctgccctccggctccaagaaggttatctcctcagccaacagagctgtggttggtgtggtggctggaggtggccgaattgacaaacccatcttgaaggctggccgggcgtaccacaaatataaggcaaagaggaactgctggccacgagtacggggtgtggccatgaatcctgtggagcatccttttggaggtggcaaccaccagcacatcggcaagccctccaccatccgcagagatgcccctgctggccgcaaagtgggtctcattgctgcccgccggactggacgtctccggggaaccaagactgtgcaggagaaagagaactagtgctgagggcctcaataaagtttgtgtttatgccaaaaaaaaaaaaaaaaaaaaaaaaaaaaaaaaaaaaaaaaaaaaaaaa

SEQ ID NO: 2005 - DNA, 1289 bp, Homo sapiens
gtctgacgggcgatggcgcagccaatagacaggagcgctatccgcggtttctgattggctactttgttcgcattataaaaggcacgcgcgggcgcgaggcccttctctcgccaggcgtcctcgtggaaggcccgggaccgcgggatgggtgtcggcgtgaccaggcctgagctccctgtctctcctcagtgacatcgtctttaaaccctgcgtggcaatccctgacgcaccgccgtgatgcccagggaagacagggcgacctggaagtccaactacttccttaagatcatccaactattggatgattatccgaaatgtttcattgtgggagcagacaatgtgggctccaagcagatgcagcagatccgcatgtcccttcgcgggaaggctgtggtgctgatgggcaagaacaccatgatgcgcaaggccatccgagggcacctggaaaacaacccagctctggagaaactgctgcctcatatccgggggaatgtgggctttgtgttcaccaaggaggacctcactgagatcagggacatgttgctggccaataaggtgccagctgctgcccgtgctggtgccattgccccatgtgaagtcactgtgccagcccagaacactggtctcgggcccgagaagacctcctttttccaggctttaggtatcaccactaaaatctccaggggcaccattgaaatcctgagtgatgtgcagctgatcaagactggagacaaagtgggagccagcgaagccacgctgctgaacatgctcaacatctcccccttctcctttgggctggtcatccagcaggtgttcgacaatggcagcatctacaaccctgaagtgcttgatatcacagaggaaactctgcattctcgcttcctggagggtgtccgcaatgttgccagtgtctgtctgcagattggctacccaactgttgcatcagtaccccattctatcatcaacgggtacaaacgagtcctggccttgtctgtggagacggattacaccttcccacttgctgaaaaggtcaaggccttcttggctgatccatctgcctttgtggctgctgcccctgtggctgctgccaccacagctgctcctgctgctgctgcagccccagctaaggttgaagccaaggaagagtcggaggagtcggacgaggatatgggatttggtctctttgactaatcaccaaaaagcaaccaacttagccagttttatttgcaaaacaaggaaataaaggcttacttctttaaaaagtaaaaaaaaaaaaaaaaaaaaaaaaa

SEQ ID NO: 2006 - DNA, 512 bp, Homo sapiens
cctttcctcagctgccgccaaggtgctcggtccttccgaggaagctaaggctgcgttggggtgaggccctcacttcatccggcgactagcaccgcgtccggcagcgccagccctacactcgcccgcgccatggcctctgtctccgagctcgcctgcatctactcggccctcattctgcacgacgatgaggtgacagtcacggaggataagatcaatgccctcattaaagcagccggtgtaaatgttgagcctttttggcctggcttgtttgcaaaggccctggccaacgtcaacattgggagcctcatctgcaatgtaggggccggtggacctgctccagcagctggtgctgcaccagcaggaggtcctgccccctccactgctgctgctccagctgaggagaagaaagtggaagcaaagaaagaagaatccgaggagtctgatgatgacatgggctttggtctttttgactaaacctcttttataacatgttcaataaaaagctgaacttt

SEQ ID NO: 2007 - DNA, 2333 bp, Homo sapiens
acgcgcctcggggaacagcctggcccaaagcctcactcctcacgtcccaggggtggacgggggtccgggagcctcgagctccgggcaggcgtggcgaggctgaagtctgggtcttccgcgccccgcgaggaccacgccgcgacgtaatcgcccgcggggaggcgcggagtggagccgcagccagctcctcccgcactctgctgaccgcgcactagctgtccttgaggcaagaatacttgggagcggaaaaaaggtgggggtgttccccggggcgggggaggaggggcaaggccccagcaagcctcttggaaatctctccctgggaggggacgaggggcggccttcagttgcaaatgggaagggctcggataccggatttgaagcagtgtttgcacggcaagcgcagcttttatttagactgccggtttgtgagggttggctctcagagcgctgatggcgattatagtggaacttcaccttcacctgctcatgcgccccgcagcgcgcccgctcccacgcccgcgtagctgaggacccagactcgccaggaaaggctagtgaggctggggcccgggcgggcccggccgggccgggtcaggggaggggcctggcggcaggggcggggcctcagctaaaggcgcggagcacccggcgccgagagcgctgagtagagcggcgcccgctcgagagaagtggggccgagatcgcgccgtcccagcccgcccgccggcgtctgcgctgctccggcgcccttacccctgctggcccttgcaaggcgcgaccggcggccatgcagccccggggctgaggccgccccatggcaaagccggcggtcccggcgacgacggcgcatggagaacttccgtaaggtgcgctccgaagaggcgccagcggggtgcggggccgagggaggcggcccgggctccggccccttcgcagacctggcgccgggcgcggtgcacatgcgggtcaaggaaggcagcaagatccggaacctgatggccttcgccaccgccagcatggcgcagccagccacgcgcgccatcgtcttcagcggctgcggccgggccaccaccaaaaccgtcacgtgcgccgagatcctcaagcgccgcctggcgggcctgcaccaggtcacgcggctgcgctaccggagcgtacgcgaggtgtggcagagcctcccgcctgggcccacgcagggtcagacgcctggcgagccggccgctagtctcagcgtacttaagaacgtgcccggcctcgccatcctactttccaaggacgcgctggatccgcgacagcccggctaccagcccccgaatccccatcctggtccctcgtccccgccagccgcgccagcgtccaagaggagcctaggggaacccgcagctggagaaggctccgcgaagcgatcgcaacccgagccaggggttgcggacgaggatcagacggcctgaaactccggactgtgggccacctagtccggcaggatcttccgccagcgcctccaccttcagatgtacctccagcctttcactcctcggtcctccggagcccacaacctggacacagctcctcaagacaggtagcatggaccttaaggcgacaagagaggggccccaggagtggcaggagaggatccccgaccaccctagggaaacttcgtgcgataattgctgcttatgcccgtgttgcgtgaagacacggaacttcaccttttctgggaccttctttgggggagaatggtggacagtgggattctggaaacttgtttgggacccccaagggttaaagccacccagcattcacgaagagcacctgaagtatggaagctgagaagagttattggaatcacccccaccgttgacagaggaaggcagggggtgagaattaactgcttgagggtaggagagtctgagatgtgggggccctattccgctccccgccctgggacagttttcctttctagttttctttcccctgcttcagaggagcatctctgagggttctagctcttttaacaccccttttccccctgctggcccagagggagacccaggactgaactctccaggcctcctcccctgagccctgcagctggctggagtcttgcttccaataaaacaagcacaaaaatggctgtgtcccccattttttttctaaccacccgcctgtgcagagacagctctcgcctggccccttgtgtctcccctcccctccagccttgcgtcctgagtctttggagtcttcagggtcaggcacagagactgaacagcttcaaaatggtgcaaggcactgcccagtccctggcttcttcctctctcctcccccactccgcc

SEQ ID NO: 2008 - DNA, 2371 bp, Homo sapiens
agactggcgcgcgcggacggtcatgggacttcagcatggcggtgtttgcagatttggacctgcgagcgggttctgacctgaaggctctgcgcggacttgtggagacagccgctcaccttggctattcagttgttgctatcaatcatatcgttgactttaaggaaaagaaacaggaaattgaaaaaccagtagctgtttctgaactcttcacaactttgccaattgtacagggaaaatcaagaccaattaaaattttaactagattaacaattattgtctcggatccatctcactgcaatgttttgagagcaacttcttcaagggcccggctctatgatgttgttgcagtttttccaaagacagaaaagctttttcatattgcttgcacacatttagatgtggatttagtctgcataactgtaacagagaaactaccattttacttcaaaagacctcctattaatgtggcgattgaccgaggcctggcttttgaacttgtctatagccctgctatcaaagactccacaatgagaaggtatacaatttccagtgccctcaatttgatgcaaatctgcaaaggaaagaatgtaattatatctagtgctgcagaaaggcctttagaaataagagggccatatgacgtggcaaatctaggcttgctgtttgggctctctgaaagtgacgccaaggctgcggtgtccaccaactgccgagcagcgcttctccatggagaaactagaaaaactgcttttggaattatctctacagtgaagaaacctcggccatcagaaggagatgaagattgtcttccagcttccaagaaagccaagtgtgagggctgaaaagaatgccccagtctctgtcagcactcccttcttcccttttatagttcatcagccacaacaaaaataaaacctttgtgtgatttactgttttcatttggagctagaaatcaatagtctataaaaacagttttacttgcaatccattaaaacaacaaacgaaacctagtgaagcatctttttaaaaggctgccagcttaatgaatttagatgtactttaagagagaaagactggttatttctcctttgtgtaagtgataaacaacagcaaatatacttgaataaaatgtttcaggtatttttgtttcattttgtttttgagatagggtctttgttgctcaggctggagtacagtggcataatcacagctcactgcaacctcaatcctgggctcaagtgatcctcccgcttcagcctctcaagcagcgggaactacaggtgtgcactaccacacctggctattttttttttttttttttttttcccttgtagagacatggtctcactatgttgctgaggctggtctcaaactcctaggatcaagccatcctcccgctttggcctcctaaagtgctgggattacatgagccaccacatgcagccagatgtttgaatattttaagagcttctttcgaaagtttcttgttcatactcaaatagtagttattttgaagatattcaaacttatattgaagaagtgactttagttcctcttgttttaagcttctttcatgtattcaaatcagcatttttttctaagaaattgctatagaatttgtggaaggagagaggatacacatgtaaaattacatctggtctcttccttcactgcttcatgcctacgtaaggtctttgaaataggattccttacttttagttagaaacccctaaaacgctaatattgattttcctgatagctgtattaaaaatagcaaagcatcggactgaaccaactttggaaataatttatttttataatgggatcatgttaagtagaagtagctttttatgcaaatacatgcatttatgcaatattaatgtaagggctctaaaacaatggagtagagccagaggtataactgaataagaaatttttttaagcaagagaaagacaactgttctgcgggttggagaaaatacaatttttttttttttttttgagacagtctcgctctgtcccccaggctggagtgcagtggctcgatctctgctcactgcaagctccgcctcctgggttcatgccattctcctgcctcagcctcctgagtagctgggactacaggcgctcgccatgtatttagcagagacggggtttcaccgtgttagccaggatggtctcaatctcctgacctcatattccacccgcctcggcctcccaaagtgctgggattacaggcgttagccactgcgcccggcccgagaaaatacagttttaaaaagagaaagctttataacctcaccaatgaatacaaatgtttaaataaaatattgattaaaaaaacattaaaagtaaaaaaaaaaaaaaaaaa

SEQ ID NO: 2009 - DNA, 641 bp, Homo sapiens
acttcctctccagcccctgcgtaatcgataaggaaacccggacgctgctgcccctttctttttttcaggcggccgggaagatggcggacattcagactgagcgtgcctaccaaaagcagccgaccatctttcaaaacaagaagagggtcctgctgggagaaactggcaaggagaagctcccgcggtactacaagaacatcggtctgggcttcaagacacccaaggaggctattgagggcacctacattgacaagaaatgccccttcactggtaatgtgtccattcgagggcggatcctctctggcgtggtgaccaagatgaagatgcagaggaccattgtcatccgccgagactatctgcactacatccgcaagtacaaccgcttcgagaagcgccacaagaacatgtctgtacacctgtccccctgcttcagggacgtccagatcggtgacatcgtcacagtgggcgagtgccggcctctgagcaagacagtgcgcttcaacgtgctcaaggtcaccaaggctgccggcaccaagaagcagttccagaagttctgaggctggacatcggcccgctccccacaatgaaataaagttattttctcattccaaaaaaaaaaaaaaaaaaaaaaaaaaaaaaaa

SEQ ID NO: 2010 - DNA, 532 bp, Homo sapiens
ctctttccctgccgccgccgagtcgcgcggaggcggaggcttgggtgcgttcaagattcaacttcacccgtaacccaccgccatggccgaggaaggcattgctgctggaggtgtaatggacgttaatactgctttacaagaggttctgaagactgccctcatccacgatggcctagcacgtggaattcgcgaagctgccaaagccttagacaagcgccaagcccatctttgtgtgcttgcatccaactgtgatgagcctatgtatgtcaagttggtggaggccctttgtgctgaacaccaaatcaacctaattaaggttgatgacaacaagaaactaggagaatgggtaggcctttgtaaaattgacagagaggggaaaccccgtaaagtggttggttgcagttgtgtagtagttaaggactatggcaaggagtctcaggccaaggatgtcattgaagagtatttcaaatgcaagaaatgaagaaataaatctttggctcacaaaaaaaaaaaaaaaaaaaaaaaaaaaaaa

SEQ ID NO: 2011 - DNA, 589 bp, Homo sapiens
ctccgccctctcccactctctctttccggtgtggagtctggagacgacgtgcagaaatggcacctcgaaaggggaaggaaaagaaggaagaacaggtcatcagcctcggacctcaggtggctgaaggagagaatgtatttggtgtctgccatatctttgcatccttcaatgacacttttgtccatgtcactgatctttctggcaaggaaaccatctgccgtgtgactggtgggatgaaggtaaaggcagaccgagatgaatcctcaccatatgctgctatgttggctgcccaggatgtggcccagaggtgcaaggagctgggtatcaccgccctacacatcaaactccgggccacaggaggaaataggaccaagacccctggacctggggcccagtcggccctcagagcccttgcccgctcgggtatgaagatcgggcggattgaggatgtcacccccatcccctctgacagcactcgcaggaaggggggtcgccgtggtcgccgtctgtgaacaagattcctcaaaatattttctgttaataaattgccttcatgtaaaaaaaaaaaaaaaaaaaaaaaaaaaaaaaa

SEQ ID NO: 2012 - DNA, 531 bp, Homo sapiens
ggcagtctcgcgataactgcgcaggcgcggaccaaagcgatctcttctgaggatccggcaagatggcagaagtagagcagaagaagaagcggaccttccgcaagttcacctaccgcggcgtggacctcgaccagctgctggacatgtcctacgagcagctgatgcagctgtacagtgcgcgccagcggcggcggctgaaccggggcctgcggcggaagcagcactccctgctgaagcgcctgcgcaaggccaagaaggaggcgccgcccatggagaagccggaagtggtgaagacgcacctgcgggacatgatcatcctacccgagatggtgggcagcatggtgggcgtctacaacggcaagaccttcaaccaggtggagatcaagcccgagatgatcggccactacctgggcgagttctccatcacctacaagcccgtaaagcatggccggcccggcatcggggccacccactcctcccgcttcatccctctcaagtaatggctcagctaataaaggcgcacatgactcc

SEQ ID NO: 2013 - DNA, 603 bp, Homo sapiens
gaaaagcggccagggtggcccctagctttccttttccggttgcggcgccgcgcggtgaggttgtctagtccacgctcggagccatgccgtccaagggcccgctgcagtctgtgcaggtcttcggacgcaagaagacagcgacagctgtggcgcactgcaaacgcggcaatggtctcatcaaggtgaacgggcggcccctggagatgattgagccgcgcacgctacagtacaagctgctggagccagttctgcttctcggcaaggagcgatttgctggtgtagacatccgtgtccgtgtaaagggtggtggtcacgtggcccagatttatgctatccgtcagtccatctccaaagccctggtggcctattaccagaaatatgtggatgaggcttccaagaaggagatcaaagacatcctcatccagtatgaccggaccctgctggtagctgaccctcgtcgctgcgagtccaaaaagtttggaggccctggtgcccgcgctcgctaccagaaatcctaccgataagcccatcgtgactcaaaactcacttgtataataaacagtttttgagggattttaaagtttcaagaaaaaaaaaaaaaaa

SEQ ID NO: 2014 - DNA, 511 bp, Homo sapiens
gtttcctcttttaccaaggacccgccaacatgggccgcgttcgcaccaaaaccgtgaagaaggcggcccgggtcatcatagaaaagtactacacgcgcctgggcaacgacttccacacgaacaagcgcgtgtgcgaggagatcgccattatccccagcaaaaagctccgcaacaagatagcaggttatgtcacgcatctgatgaagcgaattcagagaggcccagtaagaggtatctccatcaagctgcaggaggaggagagagaaaggagagacaattatgttcctgaggtctcagccttggatcaggagattattgaagtagatcctgacactaaggaaatgctgaagcttttggacttcggcagtctgtccaaccttcaggtcactcagcctacagttgggatgaatttcaaaacgcctcggggacctgtttgaattttttctgtagtgctgtattattttcaataaatctgggacaacagcaaaaaaaaaaaaaaaaaaaaaaaaaa

SEQ ID NO: 2015 - DNA, 549 bp, Homo sapiens
ctctcttccacaggaggcctacacgccgccgcttgtgctgcagccatgtctctagtgatccctgaaaagttccagcatattttgcgagtactcaacaccaacatcgatgggcggcggaaaatagcctttgccatcactgccattaagggtgtgggccgaagatatgctcatgtggtgttgaggaaagcagacattgacctcaccaagagggcgggagaactcactgaggatgaggtggaacgtgtgatcaccattatgcagaatccacgccagtacaagatcccagactggttcttgaacagacagaaggatgtaaaggatggaaaatacagccaggtcctagccaatggtctggacaacaagctccgtgaagacctggagcgactgaagaagattcgggcccatagagggctgcgtcacttctggggccttcgtgtccgaggccagcacaccaagaccactggccgccgtggccgcaccgtgggtgtgtccaagaagaaataagtctgtaggccttgtctgttaataaatagtttatatacaaaaaaa

SEQ ID NO: 2016 - DNA, 872 bp, Homo sapiens
gtactttcgccatcatagtattctccaccactgttccttccagccacgaacgacgcaaacgaagccaagttcccccagctccgaacaggagctctctatcctctctctattacactccgggagaaggaaacgcgggaggaaacccaggcctccacgcgcgaccccttggccctcccctttacctctccacccctcactagacaccctcccctctaggcggggacgaactttcgccctgagagaggcggagcctcagcgtctaccctcgctctcgcgagctttcggaactctcgcgagaccctacgcccgacttgtgcgcccgggaaaccccgtcgttccctttcccctggctggcagcgcggaggccgcacgatgcctggagttactgtaaaagacgtgaaccagcaggagttcgtcagagctctggcagccttcctcaaaaagtccgggaagctgaaagtccccgaatgggtggataccgtcaagctggccaagcacaaagagcttgctccctacgatgagaactggttctacacgcgagctgcttccacagcgcggcacctgtacctccggggtggcgctggggttggctccatgaccaagatctatgggggacgtcagagaaacggcgtcatgcccagccacttcagccgaggctccaagagtgtggcccgccgggtcctccaagccctggaggggctgaaaatggtggaaaaggaccaagatggcggccgcaaactgacacctcagggacaaagagatctggacagaatcgccggacaggtggcagctgccaacaagaagcattagaacaaaccatgctgggttaataaattgcctcattcgtaaaaaaaaaaaaaaaaaaaaaaaaa

SEQ ID NO: 2017 - DNA, 539 bp, Homo sapiens
ctttctttttgaggaagacgcggtcgtaagggctgaggatttttggtccgcacgctcctgctcctgactcaccgctgttcgctctcgccgaggaacaagtcggtcaggaagcccgcgcgcaacagccatggcttttaaggataccggaaaaacacccgtggagccggaggtggcaattcaccgaattcgaatcaccctaacaagccgcaacgtaaaatccttggaaaaggtgtgtgctgacttgataagaggcgcaaaagaaaagaatctcaaagtgaaaggaccagttcgaatgcctaccaagactttgagaatcactacaagaaaaactccttgtggtgaaggttctaagacgtgggatcgtttccagatgagaattcacaagcgactcattgacttgcacagtccttctgagattgttaagcagattacttccatcagtattgagccaggagttgaggtggaagtcaccattgcagatgcttaagtcaactattttaataaattgatgaccagttgttaaaaaaaaaaaaaaaaaa

SEQ ID NO: 2018 - DNA, 615 bp, Homo sapiens
ggggtccttccgtgcgcgttgatatgattggccggcgaatcgtggttctcttttcctccttggctgtctgaagatagatcgccatcatgaacgacaccgtaactatccgcactagaaagttcatgaccaaccgactacttcagaggaaacaaatggtcattgatgtccttcaccccgggaaggcgacagtgcctaagacagaaattcgggaaaaactagccaaaatgtacaagaccacaccggatgtcatctttgtatttggattcagaactcattttggtggtggcaagacaactggctttggcatgatttatgattccctggattatgcaaagaaaaatgaacccaaacatagacttgcaagacatggcctgtatgagaagaaaaagacctcaagaaagcaacgaaaggaacgcaagaacagaatgaagaaagtcagggggactgcaaaggccaatgttggtgctggcaaaaagtgagctggagattggatcacagccgaaggagtaaaggtgctgcaatgatgttagctgtggccactgtggatttttcgcaagaacattaataaactaaaaacttcatgtgtctggttgtttgaaaaaaaaaaaaaaaaaa

SEQ ID NO: 2019 - DNA, 699 bp, Homo sapiens
ggagacacataacctcgattttcttccgccatccggctaaatagtcccatgtgcactttgttccatggataaataaacactaggaacgcatttccaccctagatttcagcagaaatgctgaatgtaaaggaatatttgagtaaagtgagttgccgttcttgaagcccgtctcctaaggattctcccggtgtccgcgtagggatctcatgctatataggagggccctgccaggcaccgtctcctctctccggtccgtgcctccaagatgacaaagaaaagaaggaacaatggtcgtgccaaaaagggccgcggccacgtgcagcctattcgctgcactaactgtgcccgatgcgtgcccaaggacaaggccattaagaaattcgtcattcgaaacatagtggaggccgcagcagtcagggacatttctgaagcgagcgtcttcgatgcctatgtgcttcccaagctgtatgtgaagctacattactgtgtgagttgtgcaattcacagcaaagtagtcaggaatcgatctcgtgaagcccgcaaggaccgaacacccccaccccgatttagacctgcgggtgctgccccacgtcccccaccaaagcccatgtaaggagctgagttcttaaagactgaagacaggctattctctggagaaaaataaaatggaaattgtacttaaaaaaaaaaaaaaaaaaa

SEQ ID NO: 2020 - DNA, 541 bp, Homo sapiens
cttttcgatccgccatctgcggtggagccgccaccaaaatgcagattttcgtgaaaacccttacggggaagaccatcaccctcgaggttgaaccctcggatacgatagaaaatgtaaaggccaagatccaggataaggaaggaattcctcctgatcagcagagactgatctttgctggcaagcagctggaagatggacgtactttgtctgactacaatattcaaaaggagtctactcttcatcttgtgttgagacttcgtggtggtgctaagaaaaggaagaagaagtcttacaccactcccaagaagaataagcacaagagaaagaaggttaagctggctgtcctgaaatattataaggtggatgagaatggcaaaattagtcgccttcgtcgagagtgcccttctgatgaatgtggtgctggggtgtttatggcaagtcactttgacagacattattgtggcaaatgttgtctgacttactgtttcaacaaaccagaagacaagtaactgtatgagttaataaaagacatgaactaaca

SEQ ID NO: 2021 - DNA, 1084 bp, Homo sapiens
tagagcagacaagcccgccccgccgctcctcccagcagcttctatcccggaagttgatgccgagcgcagatcgcttgcagcttgctagctgtgtgggctgggaggtctggtagggctgagcttgcaagaggatcaacatgcctttggctagagatttactacatccgtccttggaagaggaaaagaaaaaacataaaaagaaacgcctagtacaaagtccaaattcttactttatggatgtaaaatgtccaggttgctacaagatcaccacggttttcagccatgctcagacagtggttctttgtgtaggttgttcaacagtgttgtgccagcctacaggaggaaaggccagactcacagaagggtgttcatttagaagaaagcaacactaatgattcaaacagcttcctgaattttaattttgtgttgtctcacagaaagccttatcataaattccataattctaattaatttaccaagataatgtaattacatttggttttgtaaggtatacagcagtaatctcctattttggtgtcagtttttcaataaagttttgattatgggcaaatcccctctttttctttttttaaaatatatttgagtatgccatacatttatatatatggtgtatatgaatttggtttaaacattttaaaatttattctgattagtttgtgtctttttttttttttttgagagagagagtcctgctctgtcactcaagctggagtgcagtggtgcgatctcggctcactgcaacctccgcctcccaggtccaagcaattctcttgccttgtcctcccaagtagctgggattataggcacacaccaccatgcctggctaatttgtgtctcattttcaagagtagaaaccctaaatattttattttcattccttttccaaattgctatgaatgggattaaaggattacagatgtaaagtctattatttgtgaattctaaatgtagttctgctgttgtacctgtggaaacatcttaaagaagtacatattttgcacgtcctgcacgtgtaccccagaacttaaactataattaaaaagaatagtttcaaaaaaataca

SEQ ID NO: 2022 - DNA, 302 bp, Homo sapiens
cttttacctcgttgcactgctgagagcaagatgggtcaccagcagctgtactggagccacccgcgaaaattcggccagggttctcgctcttgtcgtgtctgttcaaaccggcacggtctgatccggaaatatggcctcaatatgtgccgccagtgtttccgtcagtacgcgaaggatatcggtttcattaagttggactaaatgctcttccttcagaggattatccggggcatctactcaatgaaaaaccatgataattctttgtatataaaataaacatttgaaaaaacccttcaaaaaaa

SEQ ID NO: 2023 - DNA, 735 bp, Homo sapiens
cttttacctcgttgcactgctgagagcaagatgggtcaccagcagctgtactggagccacccgcgaaaattcggccagggttctcgctcttgtcgtgtctgttcaaaccggcacggtctgatccggaaatatggcctcaatatgtgccgccagtgtttccgtcagtacgcgaaggatatcggtttcattaagaaagacctgagctgtcttccttggcactgcctatggaggtgacacccatctcctccatcatggccatcctgagaccgctcgcgaagcccaagatcatcaaaaagagcaccaagttcactgggaaccagtcagactgatatgtcaaaattaagggtaactggtggaaacacagaggtattaacaacagggttcatagaaggtttgagggccagatctatgcccaacattggttatgggagaaacaaaaagacaaagcacatactgcccagtggcttctggaagttcctggtccacaacgttaaggagctggaagtactgctggtgagcaacaaatcttactgtgttgagatcactcatgatgtttcttccaagaactgcaaagccatcttggaaagagcagcccaggtggtcatcagagtcaccaatgccaatgccagcctgcacagtgcagaaagtgaatagacagtgaatgtgtttgttttattggggtttaaataaaaccaataaaactgtaaaaacaaaaacaacaaaaaaaaaaaaaaa

SEQ ID NO: 2024 - DNA, 855 bp, Homo sapiens
cctttcctttcagcggagcgcggcggcaagatggcagtgcaaatatccaagaagaggaagtttgtcgctgatggcatcttcaaagctgaactgaatgagtttcttactcgggagctggctgaagatggctactctggagttgaggtgcgagttacaccaaccaggacagaaatcattatcttagccaccagaacacagaatgttcttggtgagaagggccggcggattcgggaactgactgctgtagttcagaagaggtttggctttccagagggcagtgtagagctttatgctgaaaaggtggccactagaggtctgtgtgccattgcccaggcagagtctctgcgttacaaactcctaggagggcttgctgtgcggagggcctgctatggtgtgctgcggttcatcatggagagtggggccaaaggctgcgaggttgtggtgtctgggaaactccgaggacagagggctaaatccatgaagtttgtggatggcctgatgatccacagcggagaccctgttaactactacgttgacactgctgtgcgccacgtgttgctcagacagggtgtgctgggcatcaaggtgaagatcatgctgccctgggacccaactggtaagattggccctaagaagcccctgcctgaccacgtgagcattgtggaacccaaagatgagatactgcccaccacccccatctcagaacagaagggtgggaagccagagccgcctgccatgccccagccagtccccacagcataacagggtctccttggcagctgtattctggagtctggatgttgctctctaaagacctttaataaaattttgtacaaagacaaaaaaaaaaaaaaa

SEQ ID NO: 2025 - DNA, 930 bp, Homo sapiens
aagttctcgcgcgactcccacttccgcccttttggctctctgaccagcaccatggcggttggcaagaacaagcgccttacgaaaggcggcaaaaagggagccaagaagaaagtggttgatccattttctaagaaagattggtatgatgtgaaagcacctgctatgttcaatataagaaatattggaaagacgctcgtcaccaggacccaaggaaccaaaattgcatctgatggtctcaagggtcgtgtgtttgaagtgagtcttgctgatttgcagaatgatgaagttgcatttagaaaattcaagctgattactgaagatgttcagggtaaaaactgcctgactaacttccatggcatggatcttacccgtgacaaaatgtgttccatggtcaaaaaatggcagacaatgattgaagctcacgttgatgtcaagactaccgatggttacttgcttcgtctgttctgtgttggttttactaaaaaacgcaacaatcagatacggaagacctcttatgctcagcaccaacaggtccgccaaatccggaagaagatgatggaaatcatgacccgagaggtgcagacaaatgacttgaaagaagtggtcaataaattgattccagacagcattggaaaagacatagaaaaggcttgccaatctatttatcctctccatgatgtcttcgttagaaaagtaaaaatgctgaagaagcccaagtttgaattgggaaagctcatggagcttcatggtgaaggcagtagttctggaaaagccactggggacgagacaggtgctaaagttgaacgagctgatggatatgaaccaccagtccaagaatctgtttaaagttcagacttcaaatagtggcaaataaaaagtgctatttgtgatggtttgcttctgaaaaaaaaaaaaaaaaaaaaaaaaaaa

SEQ ID NO: 2026 - DNA, 956 bp, Homo sapiens
gggcggagcagctgaaaatccggcgcgcgcagtctccagccccaatttctacgcgcaccggaagacggaggtcctctttccttgcctaacgcagccatggctcgtggtcccaagaagcatctgaagcgggtggcagctccaaagcattggatgctggataaattgaccggtgtgtttgctcctcgtccatccaccggtccccacaagttgagagagtgtctccccctcatcattttcctgaggaacagacttaagtatgccctgacaggagatgaagtaaagaagatttgcatgcagcggttcattaaaatcgatggcaaggtccgaactgatataacctaccctgctggattcatggatgtcatcagcattgacaagacgggagagaatttccgtctgatctatgacaccaagggtcgctttgctgtacatcgtattacacctgaggaggccaagtacaagttgtgcaaagtgagaaagatctttgtgggcacaaaaggaatccctcatctggtgactcatgatgcccgcaccatccgctaccccgatcccctcatcaaggtgaatgataccattcagattgatttggagactggcaagattactgatttcatcaagttcgacactggtaacctgtgtatggtgactggaggtgctaacctaggaagaattggtgtgatcaccaacagagagaggcaccctggatcttttgacgtggttcacgtgaaagatgccaatggcaacagctttgccactcgactttccaacatttttgttattggcaagggcaacaaaccatggatttctcttccccgaggaaagggtatccgcctcaccattgctgaagagagagacaaaagactggcggccaaacagagcagtgggtgaaatgggtccctgggtgacatgtcagatctttgtacgtaattaaaaatattgtggcaggattaatagca

SEQ ID NO: 2027 - DNA, 755 bp, Homo sapiens
ctcttcctgtctgtaccagggcggcgcgtggtctacgccgagtgacagagacgctcaggctgtgttctcaggatgaccgagtgggagacagcagcaccagcggtggcagagaccccagacatcaagctctttgggaagtggagcaccgatgatgtgcagatcaatgacatttccctgcaggattacattgcagtgaaggagaagtatgccaagtacctgcctcacagtgcagggcggtatgccgccaaacgcttccgcaaagctcagtgtcccattgtggagcgcctcactaactccatgatgatgcacggccgcaacaacggcaagaagctcatgactgtgcgcatcgtcaagcatgccttcgagatcatacacctgctcacaggcgagaaccctctgcaggtcctggtgaacgccatcatcaacagtggtccccgggaggactccacacgcattgggcgcgccgggactgtgagacgacaggctgtggatgtgtcccccctgcgccgtgtgaaccaggccatctggctgctgtgcacaggcgctcgtgaggctgccttccggaacattaagaccattgctgagtgcctggcagatgagctcatcaatgctgccaagggctcctcgaactcctatgccattaagaagaaggacgagctggagcgtgtggccaagtccaaccgctgattttcccagctgctgcccaataaacctgtctgccctttggggcagtcccagccaaaaaaaaaaaaaaa

SEQ ID NO: 2028 - DNA, 829 bp, Homo sapiens
cctcttttccgtggcgcctcggaggcgttcagctgcttcaagatgaagctgaacatctccttcccagccactggctgccagaaactcattgaagtggacgatgaacgcaaacttcgtactttctatgagaagcgtatggccacagaagttgctgctgacgctctgggtgaagaatggaagggttatgtggtccgaatcagtggtgggaacgacaaacaaggtttccccatgaagcagggtgtcttgacccatggccgtgtccgcctgctactgagtaaggggcattcctgttacagaccaaggagaactggagaaagaaagagaaaatcagttcgtggttgcattgtggatgcaaatctgagcgttctcaacttggttattgtaaaaaaaggagagaaggatattcctggactgactgatactacagtgcctcgccgcctgggccccaaaagagctagcagaatccgcaaacttttcaatctctctaaagaagatgatgtccgccagtatgttgtaagaaagcccttaaataaagaaggtaagaaacctaggaccaaagcacccaagattcagcgtcttgttactccacgtgtcctgcagcacaaacggcggcgtattgctctgaagaagcagcgtaccaagaaaaataaagaagaggctgcagaatatgctaaacttttggccaagagaatgaaggaggctaaggagaagcgccaggaacaaattgcgaagagacgcagactttcctctctgcgagcttctacttctaagtctgaatccagtcagaaataagattttttgagtaacaaataaataagatcagactctg

SEQ ID NO: 2029 - DNA, 7723 bp, Homo sapiens
atgccgctggcgcagctggcggacccgtggcagaagatggctgtggagagcccgtccgacagcgctgagaatggacagcaaattatggatgaacctatgggagaggaggagattaacccacaaactgaagaagtcagtatcaaagaaattgcaatcacacatcatgtaaaggaaggacatgaaaaggcagatccttcccagtttgaacttttaaaagtattagggcagggatcatttggaaaggttttcttagttaaaaaaatctcaggctctgatgctaggcagctttatgccatgaaggtattgaagaaggccacactgaaagttcgagaccgagttcggacaaaaatggaacgtgatatcttggtagaggttaatcatccttttattgtcaagttgcattatgcttttcaaactgaagggaagttgtatcttattttggattttctcaggggaggagatttgtttacacgcttatccaaagaggtgatgttcacagaagaagatgtcaaattctacttggctgaacttgcacttgctttagaccatctacatagcctgggaataatttatagagacttaaaaccagaaaatatacttcttgatgaagaaggtcacatcaagttaacagatttcggcctaagtaaagagtctattgaccatgaaaagaaggcatattctttttgtggaactgtggagtatatggctccagaagtagttaatcgtcgaggtcatactcagagtgctgactggtggtcttttggtgtgttaatgtttgaaatgcttactggtacactccctttccaaggaaaagatcgaaaagaaacaatgactatgattcttaaagccaaacttggaatgccacagtttttgagtcctgaagcgcagagtcttttacgaatgcttttcaagcgaaatcctgcaaacagattaggtgcaggaccagatggagttgaagaaattaaaagacattcatttttctcaacgatagactggaataaactgtatagaagagaaattcatccgccatttaaacctgcaacgggcaggcctgaagatacattctattttgatcctgagtttactgcaaaaactcccaaagattcacctggcattccacctagtgctaatgcacatcagctttttcgggggtttagttttgttgctattacctcagatgatgaaagccaagctatgcagacagttggtgtacattcaattgttcagcagttacacaggaacagtattcagtttactgatggatatgaagtaaaagaagatattggagttggctcctactctgtttgcaagagatgtatacataaagctacaaacatggagtttgcagtgaagattattgataaaagcaagagagacccaacagaagaaattgaaattcttcttcgttatggacagcatccaaacattatcactctaaaggatgtatatgatgatggaaagtatgtgtatgtagtaacagaacttatgaaaggaggtgaattgctggataaaattcttagacaaaaatttttctctgaacgagaggccagtgctgtcctgttcactataactaaaaccgttgaatatcttcacgcacaaggggtggttcatagagacttgaaacctagcaacattctttatgtggatgaatctggtaatccggaatctattcgaatttgtgattttggctttgcaaaacagctgagagcggaaaatggtcttctcatgactccttgttacactgcaaattttgttgcaccagaggttttaaaaagacaaggctatgatgctgcttgtgatatatggagtcttggtgtcctactctatacaatgcttaccggttacactccatttgcaaatggtcctgatgatacaccagaggaaatattggcacgaataggtagcggaaaattctcactcagtggtggttactggaattctgtttcagacacagcaaaggacctggtgtcaaagatgcttcatgtagaccctcatcagagactgactgctgctcttgtgctcagacatccttggatcgtccactgggaccaactgccacaataccaactaaacagacaggatgcaccacatctagtaaagggtgccatggcagctacatattctgctttgaaccgtaatcagtcaccagttttggaaccagtaggccgctctactcttgctcagcggagaggtattaaaaaaatcacctcaacagccctgtgaagtgacctcagtgagatatttggtaccatggtgtaagctgatagcacaagttctggcgacaggtagcacgtatctgagagacacctgcaagcacacactgtcccagctggtacccataatgctgctgttcctgctgctgctcctgctttcctctcttctcgctttaaatgattgttagcaagttagattttcctggagcttcggaagaaatgaaaatggaaacatgatgaagatatagtcactgaatcaatgagaaaaataatgaacatatgaataccacctaaaaatacactgaataaagtacaccatatagcattatttttataggaaatatttcatgtcccttaaatattctttgttagttatagggatggacagtttatgttaagcacttagcttaaacaatccgtttatattagcactgtatcccttgtgccatccaacattttgtatgtttttgtaaacagttcatatacagtacatttctgtactgctttctttaatgtatacatgccttgtttaacttggaatctattattattaatcaattgactattaaatctggttaaatagttcacctggattaacagtattgttggacagtcctaaaaatggccagattgtggaacagctgttgaatgtaatacttccaaaatgtacatatctttccccacgtctgtttcactggttcgttcatttgtttgtttcttaaagtcaggtgctctgtcagactaacctagagagctgttatggtagagaaagttatcatatgtgtgtggcatgaaatcaagaatacacctatgaagttagtccatatactttgcaactccttagagtacttttttccttaattaaggaagtagtccttgcacttctaatcttacatagcatccatacttagaatttggcatatcatctgggattttgccaatatacgtcaaagccctttaagagtcatggtaaggagatgggtgaaggaaaatttagcaacaggtaattgaagtcctattggatatttcatgtttaaatagatattctatattaaacactaatttaaatgtaataaaggccaaaggcctctgtatgaaattggatttaaactttcttattttagggaataaaacattattgatcaaacagtatctgttctaacctaaaattataggtagggcaggctaagtgaacagcattgagtattttctgaatccctcatgataatttatagccacatactgcttcctttgacttcaggaatgatcagttttcataatggccactgggcctgcttagattgcagtattcattatctgcatctaatttggtagtttccacaatcgtatttgatgaaagaaacttcagtccccattattacctgtgtctttgccaagctgcctagcatacatcagtatgtaatgtaaaagacatatgagcaagaaaaaagtgatttaacttacctcatcaagaatgtgcccctacaggccgggcgcagtggctcacgcctgtaatcccagcattttgggaggccgaggcaggtggatcacctgaggtcaggagtttgagaccagcctggccaacatggtgaaaccccgtctctactaaaaaatacaaaaattagctgggcatggtggcgtgcacctgtaatcctagctactcaggaggctgaggcaggagaatcgcttgaacctgggaggtggtggttgcagtgagccaagatcacaccattgcactccagcctgggtgacagagtgagactctgtctcaagaaggaaaaaaaaaaaaaagaatgtactcatacagatttttgttagtcatcatgtaataagccatttatatcagaaaccttttttcctgccacagaagctttaaattttcccctaagagtacaaagccaagagagtgtggtttatctaaatgtcctgaaatccacttgtcattccttaatttctcctctatgcaattaaagagaaaggggaaatctataacatttcttttgcccaagtgacacaaaaatgattactgcatagaaatcaaatgtaagtttagcttctaaatgaaataatatataggagggatatcagaatgtctagatagagaaagtattttcaaattcttgaatatatggatgctattaaaagctgctttccattgcctggaaagagagcttttttccctcctctattcagtgtttcaaactttggtcatctcaaattattgtcacttttaaaatgttaatgtcattctgagcagaaatagatatattttcagatttttttacactgatgctactccgtaattgcttaggagtattgtccatcatagtattttagaactagaagtaaacacataaatccttataaattacccaatccaactttctcatattgcatgtagagaacctgagacacatatcaaagtctagaatccttaacttctccccattttgtttttttccgcctcatcacaccatgctgcctttccctcatatgatcaccaaccagtagctgagttcaaaaactacatatttcttgggcagtcctctactggtatgtgatgccaacttttatttctttcgaagataattgccttctttgcctagccaagcagccaattttattggagaaaagcaagttatatgttcacaaaatggaaggctttctacctaaatttatttcatctgtggtcctcttattctcttccattgcttttgacatacagtggaaaaacttggccaacgatgtgctctaaatatagtgcttgtgttgggttaacttttccattaatttctcaacatcaattattcaggcccctacagttgtggtattgaggcccctaaaggcttctgcctttcaccaattagtgctgccagttactgaggcttctcccaaaaggtatcagtccagtcttaaagatatttcattgtgaaagaagaaactaaactatcaggcctcttttacaaaatgagagattgaatttaagcttgtcaagcacgtactggaaggtatgaattacactaccatgtgttttgtatcttccctttcaagtgatgatgttaaatgaaggtaagtttttcatccttttttaatttttgttttttataaatcatttcagctttttctggtttatagaggtgtcttatttctaatgcaacagacccccaactttaacagatttgatatggatgcatttattcacaagcaaccccaaaagtccaaaaatgtaataattttgacaaggcccaaagttgagatgctatgaagcttgtgtgtgtgaaaagtcagttatgattgtctggagagaagctgtggtgtgtatgctgtagagtttccacatttcacatgcagtgtactccaaaaagcgggtttgggtcaaccatttcccatctctttttaagaagtgactgctgttggggccaggggacatcatgggaggtggggctgtccagttagctgtgccctgcaccttcagcccaggaaagatttgaacagagcaaaggcttcaagagagggcagaatgtattcggcagaaaagggactcaggtaagcccagcctgggatgagagcagaaaagcattcaagatttgcaggccttgctatggatgcgcttaatcaccatggaggccagcaatacccatctcagcatggctttgatattctctacttcctggcctttaaaaatgacctataatttttcagtttgctttactatattttataaagaaaattctatcttatggttgattgagcattgagacttatgaaggcattaggatagatagctcaggaatgtaaaggttcagaaaaggtctgttttctcagattaacaaatatgatggattccatggctgaccttggtgcttaaaccaggaggtttcaatctagtcctagagttgtgtccctctgaaaggcccaatgccatgtaactaactttaaactggatatatactttgagccttacttaattcacagataagttgacttaactcagtatttttatttcaattaatgaaaacagtcctcttttcaaccccaggttgcttacattttgctggtctccccaagtgaccattggtggagaccaattaatgaaggaatgaaattcactttattgggactgtggtattcaacagagccacacttaaccactttttccaatgaagaatctccagaatgataatgcccaaatatggatggccaagaagaatttgtatctacggtgtgctttatgtgtttttgacactgctgtattctgtgtgatcaagtgatttgcagctggttccaatgtgactgagtgttctcaaagatttctagtaactaagtcaacttaattttcttaagcctggtattactatcagcctcacatttaccactttgattctagttttttaactgttcataacagggcataccgagggttgggatgagagcctacttcctacctcttaaggcactttcctcattattttgccatataatcttgaactgcatgataagctgtttaaatgtccatgacttctcccagagcaactagcaaagtatatgacattttgaatagagattagtggaaaggaaaatgtagagatttaagttcagaggtacaaacctcaataaaacctccttagagcacataccatgagtagagtatatgtaaacgtatatgagaagagagtcgctataatagtcctctctaagtagattagttcattgtctaatggaagtgaacatctttactcctgttatcaccatagtactgaatgaactgtataatgagtttttcaaacaagtatttaaaatagaactttcacgtacaaagcaagggcataaagattttggtttgtgtttctgtaagtgtagtttaccatctaaagctttggtttttaattttaaaaaaagcttcaaggtattgccattccttagcatccttattgattatgggtgatgagtttttaactcttaaaatcatatacgtgtattagtttatcttaactgttgccctaagcaaaagggaaggtatacacctaagggatgtacttattttgcatttttggtcatgggtgggaatggggtgggtgcctacttaaatagtttttaaaaaagaaaaaaatcacaaatatttttctactgttatatatgatcttcctttatactagtttctctctagtaaggcatgccagaagcccaagataccatatcatgaattcttacatattgtaccttttgttggtggttaaatcgcatcagatgcttggcattgctgccataattataaaatgcttgtaaaggatcaaatatcactaaatactttaaattgttttacttaagagtctaatctgggaagttttcaaatcatactattaatgtgtaatctaagctcttcagatgtatccatgaataatcctggaacaatattgcttgtattcctgtcatagaacaggttttgtaatctttaaaagaaatgaaaatttatataataaagtttcaaatcaatgcaaaaaaaaaaaaaa

SEQ ID NO: 2030 - DNA, 3131 bp, Homo sapiens
gaagcgcccgccccggccggagccgccatgtaaccggcgccgcccggagcccgagccgcgcgggccccagcgacccgcccgccatgggggacgaggacgacgatgagagctgcgccgtggagctgcggatcacagaagccaacctgaccgggcacgaggagaaggtgagcgtggagaacttcgagctgctcaaggtgctgggcacgggagcctacggcaaggtgttcctggtgcggaaggcgggcgggcacgacgcggggaagctgtacgccatgaaggtgctgcgcaaggcggcgctggtgcagcgcgccaagacgcaagagcacacgcgcaccgagcgctcggtgctggagctggtgcgccaggcgcccttcctggtcacgctgcactacgctttccagacggatgccaagctgcacctcatcctggactatgtgagcggcggggagatgttcacccacctctaccagcgccagtacttcaaggaggctgaggtgcgcgtgtatgggggtgagatcgtgctggccctggaacacctgcacaagctcggcatcatttaccgagacctgaaactggagaatgtgctgctggactccgagggccacattgtcctcacggacttcgggctgagcaaggagttcctgacggaggagaaagagcggaccttctccttctgtggcaccatcgagtacatggcccccgaaatcatccgtagcaagacggggcatggcaaggctgtggactggtggagcctgggcatcttgctcttcgagctgctgacgggggcctcgcccttcaccctggagggcgagaggaacacgcaggctgaggtgtctcgacggatcctgaagtgctcccctcccttcccccctcggatcgggcccgtggcgcaggacctgctgcagcggctgctttgtaaggatcctaagaagcgattgggcgcggggccccagggggcacaagaagtccggaaccatcccttcttccagggcctcgattgggtggctctggctgccaggaagattccagccccattccggccccaaatccgctcagagctggatgtgggcaactttgcggaggaattcactcggctggagcctgtctactcaccccctggcagccccccacctggggacccccgaatctttcagggatactcctttgtggcaccctccattctctttgaccacaacaacgcggtgatgaccgatgggctggaagcgcctggtgctggagaccggccaggtcgggcagcggtggccaggagcgctatgatgcagcagtacgagctggacctgcgggagcctgcgctgggccagggcagcttttctgtgtgtcgccgctgccgccagcgccagagcggccaggagttcgcagtcaagatcctcagtcgcaggctggaggcgaacacgcagcgcgaagtggctgccctgcgcctgtgccagtcacaccccaacgtggtgaatctgcacgaggtgcatcacgaccagctgcacacgtacctggtcctggagctgctgcggggcggggagctgctggagcacatccgcaagaagcggcacttcagcgagtcggaagcaagccagatcctgcgcagcctcgtgtcggccgtgagcttcatgcacgaggaggcgggcgtggtgcaccgcgacctcaagccggagaacatcctgtacgccgacgacacgcccggggccccggtgaaaatcatcgacttcgggttcgcgcggttgcggccgcagagtcccggggtgcccatgcagacgccctgcttcacgctgcagtacgctgcccccgagctgctggcgcagcagggctacgacgagtcctgcgacctctggagcctgggcgtcattctgtacatgatgctgtcggggcaggtccccttccagggggcctctggccagggcgggcagagccaggcggccgagatcatgtgcaaaatccgcgaggggcgcttctcccttgacggggaggcctggcagggtgtatccgaggaagccaaggagctggtccgagggctcctgaccgtggaccccgccaagcggctgaagctcgagggactgcggggcagctcgtggctgcaggacggcagcgcgcgctcctcgcccccgctccggacgcccgacgtgctcgagtcctctgggcccgcagtgcgctcgggtctcaacgccaccttcatggcattcaaccggggcaagcgggagggcttcttcctgaagagcgtggagaatgcacccctggccaagcggcggaagcagaagctgcggagcgccaccgcctcccgccggggctcccctgcaccagccaacccgggccgagcccccgtcgcctccaaaggggccccccgccgagccaacggccccctgcccccctcctaatccccaccactgtgacccccttccctcataggggctgtgacctgggagcccggctcactcccggaggcctctgcctgcggctgacctgatccccaagggactgtcctttcctctcctaccccaccccactcccagacagagcagaagtatttttataagcagagaattttttatgtcttaccagatagagttgcagggaagggggggcctgctggggagtggggtttggggggccctctcccaggacactgcctcttctgggcagaaggcccctccagggggactgctccaacaggaaagagcccctcccccacttctaagcactgagttaggagtgctaactcctaaactgggaccccctaccctgttctcccctgaggccccgttcctgggaggggcacccctcaactgtcactttatggactgtctgtgcaattacgtccaccaaagacccgtgttgggggtactgaaggagaggccctgggggaccctctgaagcatttctgcctcactttatgtcatctgcttctcccctgttggggctaaggaaggagataggtggctcctaaaagaggaggccatcttctcacccaccccttcctctttggcacagctactcctggctgggggtggggccttgggggtctgggctgggcatccatggtcactgcctcagcccagccaggctgtgcctttgactttaaaataaaagtccacccagtgctgtgtgtggcaaaaaaaaaaaaa

SEQ ID NO: 2031 - DNA, 1782 bp, Homo sapiens
ggagagatgatgtttaggtccgggactgtcagtcagtgcgcggccaggtacgggccgacgggcccgcggggccggcgccgccatggcggccgtgtttgatttggatttggagacggaggaaggcagcgagggcgagggcgagccagagctcagccccgcggacgcatgtccccttgccgagttgagggcagctggcctagagcctgtgggacactatgaagaggtggagctgactgagaccagcgtgaacgttggcccagagcgcatcgggccccactgctttgagctgctgcgtgtgctgggcaaggggggctatggcaaggtgttccaggtgcgaaaggtgcaaggcaccaacttgggcaaaatatatgccatgaaagtcctaaggaaggccaaaattgtgcgcaatgccaaggacacagcacacacacgggctgagcggaacattctagagtcagtgaagcacccctttattgtggaactggcctatgccttccagactggtggcaaactctacctcatccttgagtgcctcagtggtggcgagctcttcacgcatctggagcgagagggcatcttcctggaagatacggcctgcttctacctggctgagatcacgctggccctgggccatctccactcccagggcatcatctaccgggacctcaagcccgagaacatcatgctcagcagccagggccacatcaaactgaccgactttggactctgcaaggagtctatccatgagggcgccgtcactcacaccttctgcggcaccattgagtacatggcccctgagattctggtgcgcagtggccacaaccgggctgtggactggtggagcctgggggccctgatgtacgacatgctcactggatcgccgcccttcaccgcagagaaccggaagaaaaccatggataagatcatcaggggcaagctggcactgcccccctacctcaccccagatgcccgggaccttgtcaaaaagtttctgaaacggaatcccagccagcggattgggggtggcccaggggatgctgctgatgtgcagagacatccctttttccggcacatgaattgggacgaccttctggcctggcgtgtggacccccctttcaggccctgtctgcagtcagaggaggacgtgagccagtttgatacccgcttcacacggcagacgccggtggacagtcctgatgacacagccctcagcgagagtgccaaccaggccttcctgggcttcacatacgtggcgccgtctgtcctggacagcatcaaggagggcttctccttccagcccaagctgcgctcacccaggcgcctcaacagtagcccccgggcccccgtcagccccctcaagttctccccttttgaggggtttcggcccagccccagcctgccggagcccacggagctacctctacctccactcctgccaccgccgccgccctcgaccaccgcccctctccccatccgtcccccctcagggaccaagaagtccaagaggggccgtgggcgtccagggcgctaggaagccgggtgggggtgagggtagcccttgagccctgtccctgcggctgtgagagcagcaggaccctgggccagttccagagacctgggggtgtgtctgggggtggggtgtgagtgcgtatgaaagtgtgtgtctgctggggcagctgtgcccctgaatcatgggcacggagggccgcccgccacgccccgcgctcaactgctcccgtggaagattaaagggctgaatcatggtgctgaaaaaaaaaaaaa

SEQ ID NO: 2032 - DNA, 745 bp, Homo sapiens
gcgctgtttccgcctcttgccttcggacgccggattttgacgtgctctcgcgagatttgggtctcttcctaagccggcgctcggcaagttctcccaggagaaagccatgttcagttcgagcgccaagatcgtgaagcccaatggcgagaagccggacgagttcgagtccggcatctcccaggctcttctggagctggagatgaactcggacctcaaggctcagctcagggagctgaatattacggcagctaaggaaattgaagttggtggtggtcggaaagctatcataatctttgttcccgttcctcaactgaaatctttccagaaaatccaagtccggctagtacgcgaattggagaaaaagttcagtgggaagcatgtcgtctttatcgctcagaggagaattctgcctaagccaactcgaaaaagccgtacaaaaaataagcaaaagcgtcccaggagccgtactctgacagctgtgcacgatgccatccttgaggacttggtcttcccaagcgaaattgtgggcaagagaatccgcgtcaaactagatggcagccggctcataaaggttcatttggacaaagcacagcagaacaatgtggaacacaaggttgaaactttttctggtgtctataagaagctcacgggcaaggatgttaattttgaattcccagagtttcaattgtaaacaaaaatgactaaataaaaagtatatattcacagtaaaaaaaaaaaaaaaaaa

SEQ ID NO: 2033 - DNA, 705 bp, Homo sapiens
ctctttccagccagcgccgagcgatgggcatctctcgggacaactggcacaagcgccgcaaaaccgggggcaagagaaagccctaccacaagaagcggaagtatgagttggggcgcccagctgccaacaccaagattggcccccgccgcatccacacagtccgtgtgcggggaggtaacaagaaataccgtgccctgaggttggacgtggggaatttctcctggggctcagagtgttgtactcgtaaaacaaggatcatcgatgttgtctacaatgcatctaataacgagctggttcgtaccaagaccctggtgaagaattgcatcgtgctcatcgacagcacaccgtaccgacagtggtacgagtcccactatgcgctgcccctgggccgcaagaagggagccaagctgactcctgaggaagaagagattttaaacaaaaaacgatctaaaaaaattcagaagaaatatgatgaaaggaaaaagaatgccaaaatcagcagtctcctggaggagcagttccagcagggcaagcttcttgcgtgcatcgcttcaaggccgggacagtgtggccgagcagatggctatgtgctagagggcaaagagttggagttctatcttaggaaaatcaaggcccgcaaaggcaaataaatccttgttttgtcttcacccatgtaataaaggtgtttattgttttgttcccaca

SEQ ID NO: 2034 - DNA, 1017 bp, Homo sapiens
ggggggctcccccgcaggcggtagcgaaggcagcagcagcggtggcgacatgagcagcggggcggcgtccgggacagggcgggggcggccccggggcgggggacctgggcccggggaccccccgcccagcgagacacacaagctggtggtcgtgggcggcggcggcgtgggcaagagcgcgctgaccatccagttcatccagtcctacttcgtgtctgactacgaccccactattgaggactcctacacgaagatctgcagtgtggatggcatcccagcccggctggacatcctggacaccgcgggccaggaagagttcggggccatgagagagcagtacatgcgtgctggccacggcttcctgctggtgttcgccattaacgaccggcagagtttcaacgaggtgggcaagctcttcacgcagattctgcgggtcaaggaccgcgacgacttccccgttgtgttggtcgggaacaaggcagatctggagtcacagcgccaggtcccccgatcagaagcctctgccttcggcgcctcccaccacgtggcctactttgaggcctcggccaaactgcgtctcaacgtggacgaggcttttgagcagctggtgcgggctgtccggaaataccaggaacaagagctcccaccgagccctcccagtgcccccaggaagaagggcgggggctgcccctgcgtcctcctgtagcccaggcaagagagaagcaaccaccacaagctctcgggactagctgccttcgcaccttgctgtgtgacctgaggccctcactgagcctcaatttcctcatctgggtctcccaggacacatcacatacccacccttacttcctggcctcttctgggctactgccactgtgtgccttctgccaacgcctcctgtccccacctaagcctggtgggggtgaggggctccgggtcactgctgtatataactcccctcccccagaaaaataaatgtcactgccaacgaaaaaaaaaaaaaaaaaaaaaaaaaaaaaa

SEQ ID NO: 2035 - DNA, 3234 bp, Homo sapiens
cttgcccagactcaacatggcggctacacgtcgcctgtcagtctgtgaagcctaccccgggcgtgggccgcagcgtcgagtaacgtcattcgaaccccgtcgcgcccctttgtgcgtcacgggtggcgggcgcgggaaggggatttggattgttgcgcctctgctctgaagaaagtgctgtctggctccaactccagttctttcccctgagcagcgcctggaacctaacccttcccactctgtcaccttctcgatcccgccggcgctttagagccgcagtccagtcttggatccttcagagcctcagccactagctgcgatgcatgtgatcaagcgagatggccgccaagaacgagtcatgtttgacaaaattacatctcgaatccagaagctttgttatggactcaatatggattttgttgatcctgctcagatcaccatgaaagtaatccaaggcttgtacagtggggtcaccacagtggaactagatactttggctgctgaaacagctgcaaccttgactactaagcaccctgactatgctatcctggcagccaggatcgctgtctctaacttgcacaaagaaacaaagaaagtgttcagtgatgtgatggaagacctctataactacataaatccacataatggcaaacactctcccatggtggccaagtcaacattggatattgttctggccaataaagatcgcctgaattctgctattatctatgaccgagatttctcttacaattacttcggctttaagacgctagagcggtcttatttgttgaagatcaatggaaaagtggctgaaagaccacaacatatgttgatgagagtatctgttgggatccacaaagaagacattgatgcagcaattgaaacatataatcttctttctgagaggtggtttactcatgcttcgcccactctcttcaatgctggtaccaaccgcccacaactttctagctgttttcttctgagtatgaaagatgacagcattgaaggcatttatgacactctaaagcaatgtgcattgatttctaagtctgctggaggaattggtgttgctgtgagttgtattcgggctactggcagctacattgctgggactaatggcaattccaatggccttgtaccgatgctgagagtatataacaacacagctcgatatgtggatcaaggtgggaacaagcgtcctggggcatttgctatttacctggagccttggcatttagacatctttgaattccttgatttaaagaagaacacaggaaaggaagagcagcgtgccagagatcttttctttgctctttggattccggatctcttcatgaaacgagtggagactaatcaggactggtctttgatgtgtccaaatgagtgtcctggtctggatgaggtttggggagaggaatttgagaaactatatgcaagttatgagaaacaaggtcgtgtccgcaaagttgtaaaagctcagcagctttggtatgccatcattgagtctcagacggaaacaggcaccccgtatatgctctacaaagattcctgtaatcgaaagagcaaccagcagaacctgggaaccatcaaatgcagcaacctgtgcacagaaatagtggagtacaccagcaaagatgaggttgctgtttgtaatttggcttccctggccctgaatatgtatgtcacatcagaacacacatacgactttaagaagttggctgaagtcactaaagtcgttgtccgaaacttgaataaaattattgatataaactactatcctgtaccagaggcatgcctatcaaataaacgccatcgccccattggaattggggtacaaggtctggcagatgcttttatcctgatgagatacccttttgagagtgcagaagcccagttactgaataagcagatctttgaaactatttattatggtgctctggaagccagctgtgaccttgccaaggagcagggcccatacgaaacctatgagggctctccagttagcaaaggaattcttcagtatgatatgtggaatgttactcctacagacctatgggactggaaggttctcaaggagaagattgcaaagtatggtataagaaacagtttacttattgccccgatgcctacagcttccactgctcagatcctggggaataatgagtccattgaaccttacaccagcaacatctatactcgcagagtcttgtcaggagaatttcagattgtaaatcctcacttattgaaagatcttaccgagcggggcctatggcatgaagagatgaaaaaccagattattgcatgcaatggctctattcagagcataccagaaattcctgatgacctgaagcaactttataaaactgtgtgggaaatctctcagaaaactgttctcaagatggcagctgagagaggtgctttcattgatcaaagccaatctttgaacatccacattgctgagcctaactatggcaaactcactagtatgcacttctacggctggaagcagggtttgaagactgggatgtattatttaaggacaagaccagcggctaatccaatccagttcactctaaataaggagaagctaaaagataaagaaaaggtatcaaaagaggaagaagagaaggagaggaacacagcagccatggtgtgctctttggagaatagagatgaatgtctgatgtgtggatcctgaggaaagacttggaagagaccagcatgtcttcagtagccaaactacttcttgagcatagataggtatagtgggtttgcttgaggtggtaaggctttgctggaccctgttgcaggcaaaaggagtaattgatttaaagtactgttaatgatgataatgattttttttttaaactcatatattgggattttcaccaaaataatgcttttgaaaaaaagaaaaaaaaaacggatatattgagaatcaaagtagaagttttaggaatgcaaaataagtcatcttgcatacagggagtggttaagtaaggtttcatcacccctttagcactgcttttctgaagacttcagttttgttaaggagatttagttttactgctttgactggtgggtctctagaagcaaaactgagtgataactcatgagaagtactgataggacctttatctggatatggtcctataggttattctgaaataaagataaacatttctaagtgaaaaaaaaaaaaaaaaaaaaaaaaaaaaaaaaaaaaaaaaaaaa

SEQ ID NO: 2036 - DNA, 2500 bp, Homo sapiens
cccaggcgcagccaatgggaagggtcggaggcatggcacagccaatgggaagggccggggcaccaaagccaatgggaagggccgggagcgcgcggcgcgggagatttaaaggctgctggagtgaggggtcgcccgtgcaccctgtcccagccgtcctgtcctggctgctcgctctgcttcgctgcgcctccactatgctctccctccgtgtcccgctcgcgcccatcacggacccgcagcagctgcagctctcgccgctgaaggggctcagcttggtcgacaaggagaacacgccgccggccctgagcgggacccgcgtcctggccagcaagaccgcgaggaggatcttccaggagcccacggagccgaaaactaaagcagctgcccccggcgtggaggatgagccgctgctgagagaaaacccccgccgctttgtcatcttccccatcgagtaccatgatatctggcagatgtataagaaggcagaggcttccttttggaccgccgaggaggttgacctctccaaggacattcagcactgggaatccctgaaacccgaggagagatattttatatcccatgttctggctttctttgcagcaagcgatggcatagtaaatgaaaacttggtggagcgatttagccaagaagttcagattacagaagcccgctgtttctatggcttccaaattgccatggaaaacatacattctgaaatgtatagtcttcttattgacacttacataaaagatcccaaagaaagggaatttctcttcaatgccattgaaacgatgccttgtgtcaagaagaaggcagactgggccttgcgctggattggggacaaagaggctacctatggtgaacgtgttgtagcctttgctgcagtggaaggcattttcttttccggttcttttgcgtcgatattctggctcaagaaacgaggactgatgcctggcctcacattttctaatgaacttattagcagagatgagggtttacactgtgattttgcttgcctgatgttcaaacacctggtacacaaaccatcggaggagagagtaagagaaataattatcaatgctgttcggatagaacaggagttcctcactgaggccttgcctgtgaagctcattgggatgaattgcactctaatgaagcaatacattgagtttgtggcagacagacttatgctggaactgggttttagcaaggttttcagagtagagaacccatttgactttatggagaatatttcactggaaggaaagactaacttctttgagaagagagtaggcgagtatcagaggatgggagtgatgtcaagtccaacagagaattcttttaccttggatgctgacttctaaatgaactgaagatgtgcccttacttggctgattttttttttccatctcataagaaaaatcagctgaagtgttaccaactagccacaccatgaattgtccgtaatgttcattaacagcatctttaaaactgtgtagctacctcacaaccagtcctgtctgtttatagtgctggtagtatcaccttttgccagaaggcctggctggctgtgacttaccatagcagtgacaatggcagtcttggctttaaagtgaggggtgaccctttagtgagcttagcacagcgggattaaacagtcctttaaccagcacagccagttaaaagatgcagcctcactgcttcaacgcagattttaatgtttacttaaatataaacctggcactttacaaacaaataaacattgttttgtactcacggcggcgataatagcttgatttatttggtttctacaccaaatacattctcctgaccactaatgggagccaattcacaattcactaagtgactaaagtaagttaaacttgtgtagactaagcatgtaatttttaagttttattttaatgaattaaaatatttgttaaccaactttaaagtcagtcctgtgtatacctagatattagtcagttggtgccagatagaagacaggttgtgtttttatcctgtggcttgtgtagtgtcctgggattctctgccccctctgagtagagtgttgtgggataaaggaatctctcagggcaaggagcttcttaagttaaatcactagaaatttaggggtgatctgggccttcatatgtgtgagaagccgtttcattttatttctcactgtattttcctcaacgtctggttgatgagaaaaaattcttgaagagttttcatatgtgggagctaaggtagtattgtaaaatttcaagtcatccttaaacaaaatgatccacctaagatcttgcccctgttaagtggtgaaatcaactagaggtggttcctacaagttgttcattctagttttgtttggtgtaagtaggttgtgtgagttaattcatttatatttactatgtctgttaaatcagaaattttttattatctatgttcttctagattttacctgtagttcataaaaaaaaaaaaaaaaaaaaaaaaa

SEQ ID NO: 2037 - DNA, 2499 bp, Homo sapiens
gtgatccctgcgcgcgtctcctgctcgggtcagtgcgccgcgctgcgctgggcgccatggcgctccccggagcccgggctcgcggctgggcggcagcagccagagcggcccagaggcgccgccgcgtggagaacgcaggagggtccccgagtcctgagcctgcgggccggcgcgcggcgctttacgtacactggccttactgcgagaagcgctgcagttactgcaacttcaacaagtacatccctcgccgcctggaggaggctgccatgcagaagtgtctggtgaccgaagctcagacgctgctgcggctcagcggggtgcaacgggtggagtctgtgttctttggtggggggacccccagtctagccagtccccacacggtggctgctgtcctggaggctgtggcacaggcagcccacctgcctgcagacttggaagtcacattggaggctaatcctacttcagctccgggctccagactggcagagttcggggcagcaggggttaacaggttgtctataggcctccagtccctagatgacactgagctccggctgttgggacggacgcactcggcctgcgatgctctgcggacgctggcagaggcccggcgcctctttcccgggcgcgtgtctgtagacttgatgctggggctgccggcacagcaggtggggccgtggcttgggcagctgcaggaactgctgcaccactgtgatgaccacctctccctctaccagctgtccctggagcggggcaccgcactcttcgcccaggtgcagcggggtgcccttccagcccctgacccggagctcgcagctgagatgtaccagaggggccgggctgtccttcgggaggctggcttccaccagtatgaggtctccaactttgcccggaatggggcgctcagtacccacaattggacttactggcagtgtggtcagtaccttggcgttgggcctggggcccatggacgatttatgccccagggggctggaggccacacccgggaggctcggatccagacactggagcctgacaactggatgaaggaggtgatgctgtttggccatggcacccggaagcgtgtccccctgggcaggctggagctgctggaggaagttttggccctggggctacgcaccgatgtggggatcactcaccagcactggcagcagtttgagccccagctgaccctgtgggatgtgtttggagcgaacaaggaggtgcaggagctgctggagcggggcctactgcagctggatcacaggggtcttcggtgttcctgggagggtctggctgtgctggactctctcttgctgaccctcctgcctcagctccaagaagcctggcagcagagaaccccctcccctgtgccaggaggatgacaaaaatgttcctgtgttccagggtaatgccaggtgggttttgagagctgggtcggtactgcagacatctcttctccgttgtcgggtgccgtctctgctccttgtggttattgctcagccctggcatccccaggggaatggcagcagtgaggtagatgggaggacatttctggtcagggaactggcatcccattcagcatctcaggactcacaggccaacatgtgttccatggctgggaattgcctaccacccacatcagcttctgtttacctttttggcatcaaataatgaacagtgtttggaaatctttctacaggcaattacctccccaagagaagccttccttattttggagtaaggtcctaagatagctggatgaatcaggaaaaccatgtcccctctaggtattattaatattagcaggaagggatctactataggaatgaagtatttataaaccactgaaagggatagagaagtgaacattggagaaagccagtagcaactgtgagaaatcagcaacttgcaggaggcacagaaaactcctgctgatggtctcagcttccagcagcacaaaagcagatgatgtactggaaaatgctcagaagatgctacaaaacctcatgcctactgtctgccactgctggagaaggaatcatggtttctagaagtgcctctcattagtggactttaaagcaaatcctggctggcaggaaattctgaggaatatagctcttaggcttccagcctctaccatgcaggagagaacacagaaggactgatgtatgttggtggatccatgtatgtgtccagcacagcggcctgctggactctgagaactgggaaagatcagagcaagccttgcctcttatcttcgggaaaccagaatatgtttggggtggtaggagccacacagactcttctgagccccctcactcacttccttccccctgtgcctttcctttgagagtgaaggtgggtggagttgaccagagaaaggggagagaattcgggaaagacccaaagtgtttgtaattcttctttgtccttttacctacagaaatggtcacatggttctatttaaatagcctaataaacacatctggagcctgt

SEQ ID NO: 2038 - DNA, 4307 bp, Homo sapiens
gccgaggcctgcgcgccgcccggccgcctgcactgcgcgcgcgcccaccccgcgtgggaggcagcgggaggggcccggagaggtgtggagcggcgcggcgggaggctccgtgggcggccacgggagacagcgccggcgggagcgcgcctctcggcctttcctccgcgcccccgcgtccccagccggccgctccgagaggacccggaggaggcaggtggctttctagaagatgaccatagaggaccttccagattttccattagaaggaaatcctttgtttggaagatacccatttatattttctgcttctgataccccagttatcttttccatttctgcagcaccaatgccttcagactgtgaattttctttctttgatcctaatgatgcatcatgccaggaaattctttttgatcccaaaacttcagtttcagaattatttgccattttgagacagtgggttcctcaggtccaacaaaacattgacattattggaaatgagattcttaagagaggttgcaatgtgaatgatagagatggattgacagatatgactcttttacattatacctgcaaatctggagctcatggtattggtgatgtggaaacagctgtaaaatttgcaactcagcttattgacctgggagcagacattagtttgcggagtcgctggacaaacatgaatgctttgcattatgctgcttattttgatgtccctgaacttataagagtgattttgaaaacgtcgaaaccaaaagatgtggatgccacttgcagtgattttaattttggaacagctttgcatattgcagcatacaacttgtgtgcaggtgctgtgaagtgcctcttggagcagggagcaaatcctgcatttaggaatgacaaaggacagatccctgctgatgttgttccagacccagtagatatgccgttagagatggctgacgccgcagccactgctaaggaaatcaagcagatgcttctagatgcggtgcctctgtcatgtaacatctcaaaggccatgctcccaaattatgatcatgtcactggcaaggcaatgcttacgtcacttggcctgaagttgggggatcgtgttgttattgcaggacagaaggttggtacattaagattttgtggaacaactgaatttgcaagtgggcagtgggctggcattgaactggatgaaccagaaggaaaaaataatggaagtgttggaaaagtccagtactttaaatgtgcccccaagtatggtatttttgcacctctttcaaagataagtaaagcaaaaggtcgaaggaagaatataacacacactccttctacaaaagctgctgtacctctcatcaggtcccagaaaattgacgtagctcatgtgacgtcaaaagtaaatactggattaatgacatcaaaaaaagatagtgcttctgagtcaacactttcattgcctcctggtgaagaacttaaaactgtgacagagaaagatgttgccctgcttggatctgtcagcagctgctcctctacatcttctttggaacacagacagagctaccccaagaaacagaatgcaatcagcagtaacaagaagacaatgagcaaaagcccttccctttcatccagagccagtgctggtttgaattcctcagcaacatctacagcaaataatagccgttgcgagggggaactccgcctcggagagagagtgttagtggtaggacagagactgggcaccattaggttctttgggacaacaaacttcgctccaggatattggtatggtatagagcttgaaaaaccccatggcaagaatgatggttcagttggaggtgtgcagtattttagctgttctccaagatatggaatatttgctcccccatccagggtgcaaagagtaacagattccctggataccctttcagaaatttcttcaaataaacagaaccattcttatcctggttttaggagaagttttagcacaacttctgcttcttcccaaaaggagattaacagaagaaatgctttttccaaatcgaaagctgctttgcgtcgcagttggagcagcacccccaccgcaggtggcattgaagggagcgtgaagctgcacgaggggtctcaggtcctgctcacgagctccaatgagatgggtactgttaggtatgtgggccccactgactttgcttcaggtatctggcttggacttgagctccgaagcgccaagggaaaaaatgatgggtcagtgggtgacaagcgctatttcacctgtaagccgaaccatggagtcttagttcgaccgagcagagtgacctatcggggaattaatgggtcaaaacttgtggatgagaattgttaagcttctaaaatattaaataagctcaaatatatatatttggtgtaaataaagagtccatggtaaatggtttactttatttagccatattaaaattttgaaaatatagttatcttcttaaaaaccattataacaattcagagagagttctttacaaagccatgaatatgaactatggggaatcatggttcttttaaagcaattttcaaaataagtaccaattaaagctttaggttccaagaagattctgggactcaggaagaaaaagtgccatcaggtgaccagctgttgcatttcttgcttattctgttttgtttttgcacatcataatggatttttcttagtgccctaattgtgaagggtttctctagctttggttatgtgtaatgttcacgtgacctttttttgtcaatcatttttggaatttttctttctttctgtgctttattactaataagtccaatgagtgagtagtagctagatgactagtatgtagttttatattttggtaaaattatttgccctttcagaaatgcctcatctaaagatacatgataattttggagttggaaggggccttagaggctctccagctctgcttcttgcccattgccaaatactgaaatggaagcccgtcttacctggggtcactaactggttggttaactgagctaagaatagactgtgggtctcctcacttgtggcccagtgctctttctgctatacaaaatgcctaatctcagatttttcttctgctgcttgactgcttcatctggatgaactacaaaaaacccatgattaaggtttatgaattcaagtaataattagattttttttgcacagacttacttaacttccttattggatatgtttgtaacacataaacacaaagcacttttcaaacatgatgcacttttatctttgtgaataatttactgtcctttcctcctgggatatgagaaacattttaaaaaacgtatttaacagaagagagcaaataaagatatatcaggaaggatgtattagttatttacttaaatgtttataatatctggattttttttgttttgttactcatagaactggtgttgtttgctgtttttatttctctaattgttgcagagttctgcctgttacaaagctacagaactgtattgtttttattttccttcttgagcacatgttaacaaactaagcttcacattagagtgatgtcataatgtaaaatgtttgcattgtggttaggtattgaagtttatgtcctgtctgtgtaaagattcatcttttattgtaaatatttagactttaccacagaaatattggaacagtttgctttataagattaaaaagcatccttcagaatggagcttgccttgtgcttagaaataatatgttgaactattttgcaatatactatttttaaatctaaattctgtcacttcgctgcctttttaaaatagtgtggtatttcaaatattgctagagctattttcctgaaatacatttgcaaaataaggctgctttgtaatcaaggaatatttttattgattgaaggaaatgactgtactgcgattcaaaagtaaacttattttattatacagattatttcttaaaaactctatttataccttaacatgaaatccatgaccacaccaaacttggttattcataatttttcctgttaaatataaaacactgtaagttaaaaacagtaatgccaacattgaatttatttttgaggtcaaagaaccagttgttctctttatatttagatgaggatgattgagtccatatactatgtatgtttacatatactatacatgcacattaggtgttttcatttgtgttttgcttatgaaatgtcatttaaagttcacttcttgagcatcaataaaaagggaagctgtgtggttttggaaaaaaaaaaaaaaaaaaaaaaaaagaaaaaaaaaaaaaaaaaaag

SEQ ID NO: 2039 - DNA, 2892 bp, Homo sapiens
caaagatggctgccacattggcgctgtcattttggtactgagcagagcgacgggcttaattcgacccaatccaggccagagtctttctctcaggggcttcctcgtgctcagctaatcctccgatcaatccttgggaatccctgggacctcttcggtatccctactctcagccagggatcatgtcttgggccgctcgcccgcccttcctccctcagcggcatgccgcagggcagtgtgggccggtgggggtgcgaaaagaaatgcattgtggggtcgcgtcccggtggcggcggcgacggccctggctggatcccgcagcggcggcggcggcggcggtggcaggcggagaacaacaaaccccggagccggagccaggggaggctggacgggacgggatgggcgacagcgggcgggactcccgaagcccagacagctcctccccaaatccccttccccagggagtccctcccccttctcctcctgggccacccctacccccttcaacagctccatcccttggaggctctggggccccacccccacccccgatgccaccacccccactgggctctccctttccagtcatcagttcttccatggggtcccctggtctgccccctccagctcccccaggattctccgggcctgtcagcagcccccagattaactcaacagtgtcactccctgggggtgggtctggcccccctgaagatgtgaagccaccagtcttaggggtccggggcctgcactgtccaccccctccaggtggccctggggctggcaaacggctatgtgcaatctgcggggacagaagctcaggcaaacactacggggtttacagctgtgagggttgcaagggcttcttcaaacgcaccatccgcaaagaccttacatactcttgccgggacaacaaagactgcacagtggacaagcgccagcggaaccgctgtcagtactgccgctatcagaagtgcctggccactggcatgaagagggaggcggtacaggaggagcgtcagcggggaaaggacaaggatggggatggggagggggctgggggagcccccgaggagatgcctgtggacaggatcctggaggcagagcttgctgtggaacagaagagtgaccagggcgttgagggtcctgggggaaccgggggtagcggcagcagcccaaatgaccctgtgactaacatctgtcaggcagctgacaaacagctattcacgcttgttgagtgggcgaagaggatcccacacttttcctccttgcctctggatgatcaggtcatattgctgcgggcaggctggaatgaactcctcattgcctccttctcacaccgatccattgatgttcgagatggcatcctccttgccacaggtcttcacgtgcaccgcaactcagcccattcagcaggagtaggagccatctttgatcgggtgctgacagagctagtgtccaaaatgcgtgacatgaggatggacaagacagagcttggctgcctgagggcaatcattctgtttaatccagatgccaagggcctctccaaccctagtgaggtggaggtcctgcgggagaaagtgtatgcatcactggagacctactgcaaacagaagtaccctgagcagcagggacggtttgccaagctgctgctacgtcttcctgccctccggtccattggccttaagtgtctagagcatctgtttttcttcaagctcattggtgacacccccatcgacaccttcctcatggagatgcttgaggctccccatcaactggcctgagctcagacccagacgtggtgcttctcacactggaggagcacacatccaagagggactccaagccctggggcagggtggggggccatgttcccagaaccttgatggggtgagaagtacagggcagaaccaagaacataaaccctccaagggatctgcttgatatcccaagttggaagggaccccagatacctgtgaggactggttgtctctcttcggtggccttgagtctctgaatttgtcgggttctcccatgatttggggtgatttctcaccctctgtccttcccccagcacaaagcactggccttgcctccaggaccttgcttccttctcatcttgcctcattttgcttcccatctgaagagtggaaatggggaactcccccagaggtggatactggggggcaggcctcccaagctgatggacatgagagtagggccctgacaggccttcctcctctcaaacctggcagatgggggcctctctggaagagggaggggccctgtcactgtccagagtctctttttacacttcacctccttctgcagtcagactgaaatataaaaaaggtggtggtggtggtgaaggggctggtggagatgtaggaaccgatctgctatttttaatttcctgtgaggatagagacttgcagttagactcaaagaagtactgtactttcccaggttgactaagaaatgccagtggtggaggtgggtgtttgggaaaggcagggccctgaaatggcctgtccctagggctctccaagcactagccttcccagcttcccgccgccccccctatctcttcctgtctaacttggggaaggggcctgggctgtgaggacagggcccccacaggggatggtttcacgagtgtagtcccggaggccttccctttacagctctcctccagccctgggcacatagcataggctggggacacaggatcctggcctgagaattgaggggaggtggccagcccgcagaggtggggtgctggggctgcatgatttttgccctgcgtcccttctctttggggctcctttcccctctcatacataaaatcgctttcaaattaaaatcgctgttttctggaaaaaaaaaaaaaaaaaa

SEQ ID NO: 2040 - DNA, 1095 bp, Homo sapiens
tgccgcccaggacccgcagcagagacgacgcctgcagcaaggagaccaggaaggggtgagacaaggaagaggatgtctgagctggagaaggccatggtggccctcatcgacgttttccaccaatattctggaagggagggagacaagcacaagctgaagaaatccgaactcaaggagctcatcaacaatgagctttcccatttcttagaggaaatcaaagagcaggaggttgtggacaaagtcatggaaacactggacaatgatggagacggcgaatgtgacttccaggaattcatggcctttgttgccatggttactactgcctgccacgagttctttgaacatgagtgagattagaaagcagccaaacctttcctgtaacagagacggtcatgcaagaaagcagacagcaagggcttgcagcctagtaggagctgagctttccagccgtgttgtagctaattaggaagcttgatttgctttgtgattgaaaaattgaaaacctctttccaaaggctgttttaacggcctgcatcattctttctgctatattaggcctgtgtgtaagctgactggccccagggactcttgttaacagtaacttaggagtcaggtctcagtgataaagcgtgcaccgtgcagcccgccatggccgtgtagaccctaacccggagggaaccctgactacagaaattaccccggggcacccttaaaacttccactacctttaaaaaacaaagccttatccagcattatttgaaaacactgctgttctttaaatgcgttcctcatccatgcagataacagctggttggccggtgtggccctgcaagggcgtggtggcttcggcctgcttcccgggatgcgcctgatcaccaggtgaacgctcagcgctggcagcgtcctggaaaaagcaactccatcagaactcgcaatccgagccagctctgggggctccagcgtggcctccgtgacccatgcgattcaagtcgcggctgcaggatccttgcctccaacgtgcctccagcacatgcggcttccgagggcactaccgggggctctgagccaccgcgagggcctgcgttcaataaaaag

SEQ ID NO: 2041 - DNA, 4668 bp, Homo sapiens
atgtcgcggaggaagcaagcgaagcctcaacatttccaatccgaccccgaagtggcctcgctcccccggcgagatggagacacagaaaagggtcaaccgagtcgccctactaagagcaaggatgcccacgtctgtggccggtgctgtgccgagttctttgaattatcagatcttctgctccacaagaagaactgtactaaaaatcaattagttttaatcgtaaatgaaaatccaggctccccacccgaaaccttctcccccagcccccctcctgataatcctgatgaacaaatgaatgacacagttaacaaaacagatcaagtggactgcagcgacctttcagaacacaacggacttgacagggaagagtccatggaggtggaggccccggttgctaacaaaagcggcagcggcacttccagcggcagccacagcagtaccgccccaagcagcagcagcagcagcagcagcagcagcggcggcggcggcagctcctccacaggtacctcagcgatcacaacctctctacctcaactcggggacctgacaacactgggcaacttctccgtaatcaacagcaacgtcatcatcgagaacctccagagcaccaaggtggcggtggcccagttctcccaggaagcgaggtgcggcggggcctctgggggcaagctggccgtcccagccctcatggaacaactcctagctctgcagcagcagcagatccaccagctgcaattgatcgaacagattcgtcaccaaatattgctgttggcttctcagaatgcagacttgccaacatcttctagtccttctcaaggtactttacgaacatctgccaaccccttgtccacgctaagttcccatttatctcagcagctggcagcagcagctggattggcacagagcctcgccagccaatctgccagcattagtggtgtgaaacagctacccccaatccagctacctcagagcagttctggcaacaccatcattccatccaacagcggctcttctcccaatatgaacatattggcagcggcagttaccaccccgtcctctgaaaaagtggcttcaagtgctggggcctcccatgtcagcaacccagcggtctcatcatcgtcctcaccagcttttgcaataagcagtttattaagtcctgcgtctaatccacttctacctcagcaagcctccgctaactcggttttccccagccctttgcccaacatcggaacaactgcagaggatttaaactccttgtctgccttggcccagcaaagaaaaagcaagccaccaaatgtcactgcctttgaagcgaaaagtacttccgatgaggcattcttcaaacacaagtgcaggttctgcgcgaaggtctttgggagtgacagtgccttgcagatccacttgcgttcccataccggagagaggccattcaagtgcaacatctgcgggaacaggttctccaccaaggggaatctgaaagtccactttcagcgccacaaagagaaataccctcatatccagatgaacccctatcctgtgcctgagcatttggacaatatccccacgagtactggcatcccatatggcatgtccatccctccagagaagccagtcaccagctggctagacaccaaaccagtcctgcctactctgaccacttcagtcggcctgccgttgcccccaagcctcccaagcctcatacccttcatcaagacggaagagccagcccccatccccatcagccattctgccaccagccccccaggctcagtcaaaagtgactccgggggccctgagtcagccacaagaaatctaggtgggctcccagaggaagccgaagggtccactctgccaccctctggtggcaaaagcgaagagagtggcatggtcaccaactcagtcccgacggcgagcagtagcgtcctgagctccccagcggcagactgcggccccgcgggcagtgccaccaccttcaccaaccctttgttgccgctcatgtccgagcagttcaaggccaagtttccttttgggggactcctggactcagctcaggcatcagagacgtccaagcttcagcaactggtagaaaacattgacaagaaggccactgaccccaatgagtgcatcatctgtcaccgggttctcagctgccagagcgccttgaaaatgcactacaggacacacactggggagaggccctttaagtgtaagatctgtggccgggctttcaccacgaaagggaatcttaaaacccactacagtgtccatcgtgctatgcccccgctcagagtccagcattcctgccccatctgccagaagaagttcacgaacgctgtggtcctgcagcagcacatccgaatgcatatgggaggccagatccccaacaccccagtccccgacagctactctgagtccatggagtctgacacaggttcctttgatgagaaaaattttgatgacctagacaacttctctgatgaaaacatggaagactgtcctgagggcagcatccctgatacacctaagtctgcagacgcctcccaagacagcttatcctcttcgcctttgccccttgagatgtcgagcatcgctgctttggaaaatcagatgaagatgatcaatgctggcctggcagagcagctacaggccagcctgaagtcagtggagaatgggtccatcgagggggatgtcctgaccaatgattcatcctcagtgggtggtgacatggaaagccaaagtgctggcagcccagccatctcagagtctacctcttccatgcaggctctgtccccgtccaacagcacgcaggagttccacaagtcacccagcattgaggagaaaccacagagagcggtcccaagcgagtttgccaatggtttgtctcccaccccagtgaatggtggggctttggatttgacatctagtcacgcagagaaaatcatcaaagaagattctttggggatcctcttcccttttagagaccggggtaaatttaaaaacactgcttgtgacatttgtggcaaaacatttgcttgtcagagtgccttggacattcactatagaagtcataccaaagagagaccatttatttgcacagtttgcaatcgtggcttttccacaaagggtaatttgaagcagcacatgttgacacatcagatgcgagatctgccatcccagctctttgagcccagttccaaccttggccccaatcagaactcagcggtgattcccgccaactcgttgtcatctctcatcaagacagaggtcaacggcttcgtgcatgtttctcctcaggacagtaaggacacccccaccagtcacgtcccgtctgggcctctgtcttcctctgccacatccccagttctgctccctgctctgcccaggagaactcccaagcagcactactgcaacacatgtggcaaaaccttctcctcatcgagtgccctgcagattcacgagagaactcacactggagagaaaccctttgcttgcactatttgtggaagagctttcacgactaaaggcaatcttaaggtacacatgggcactcacatgtggaatagcacccctgcacgacggggtcggcggctctctgtggatggccccatgacatttctaggaggcaatcccgtcaagttcccagaaatgttccagaaggatttggcggcaagatcaggaagtggggatccttccagcttctggaatcagtatgcagcagcgctctccaacgggctggcgatgaaggccaacgagatctccgtcattcagaacggtggcatccctccaattcctggaagcctcggcagtgggaacagctcacctattagtgggctgacgggaaacctggagaggctccagaactcagagcccaatgctcccctggccggcctggagaaaatggcaagcagtgagaacggaaccaacttccgcttcacccgcttcgtggaggacagcaaggagatcgtcacgagttaaagcagctcgggctggagacatagcattcattcctgttcagaatgcgacctatggtggcctcctactccttgccccccaccccgccccgccccttccttctgttccccagatctatgaactacaacattatgaagacattcttttgtaccttgttcaactttagagttctaagaaagcttatttattagcgatataaccttgctttgcaaacagaatgcaagcgttaactttggtcttctgtattttggactaaatactaattgactagagtgctgtaaacttgctgtaacatttatggcaattgcaagttgccctgctaggcagttgtaatctggcattaacttattttctatatccagtttaatatgaatctggtgttgatgcaatgcctcagtgatgcattagatctctaataaagtctgtatatacatgtacactttgatcctgctggaaaattttatcagcaaacacattgtctaatctttcaaaacagatttaaggaaaggactgaaagtacagactgaacagtgtggttctttgaaaggtttggttttttaatttttattctaaaattcaaccttttttttgtcgatttaaccatttccattttgaactgctatttgtattgtgctttttacttgagtcgtcttcaatgttaataagtttctgtacagtaataagcacgcagaattc

SEQ ID NO: 2042 - DNA, 3452 bp, Homo sapiens
aactccaggaatttgtggcggagagggcaaataactgcggctctcccggcgccccgatgctcgcaccatgtcgaggcgcaagcaggcgaaaccccagcacatcaactcggaggaggaccagggcgagcagcagccgcagcagcagaccccggagtttgcagatgcggccccagcggcgcccgcggcgggggagctgggtgctccagtgaaccacccagggaatgacgaggtggcgagtgaggatgaagccacagtaaagcggcttcgtcgggaggagacgcacgtctgtgagaaatgctgtgcggagttcttcagcatctctgagttcctggaacataagaaaaattgcactaaaaatccacctgtcctcatcatgaatgacagcgaggggcctgtgccttcagaagacttctccggagctgtactgagccaccagcccaccagtcccggcagtaaggactgtcacagggagaatggcggcagctcagaggacatgaaggagaagccggatgcggagtctgtggtgtacctaaagacagagacagccctgccacccaccccccaggacataagctatttagccaaaggcaaagtggccaacactaacgtgaccttgcaggcactacggggcaccaaggtggcggtgaatcagcggagcgcggatgcactccctgcccccgtgcctggtgccaacagcatcccgtgggtcctcgagcagatcttgtgtctgcagcagcagcagctacagcagatccagctcaccgagcagatccgcatccaggtgaacatgtgggcctcccacgccctccactcaagcggggcaggggccgacactctgaagaccttgggcagccacatgtctcagcaggtttctgcagctgtggctttgctcagccagaaagctggaagccaaggtctgtctctggatgccttgaaacaagccaagctacctcacgccaacatcccttctgccaccagctccctgtccccagggctggcacccttcactctgaagccggatgggacccgggtgctcccgaacgtcatgtcccgcctcccgagcgctttgcttcctcaggccccgggctcggtgctcttccagagccctttctccactgtggcgctagacacatccaagaaagggaaggggaagccaccgaacatctccgcggtggatgtcaaacccaaagacgaggcggccctctacaagcacaagtgtaagtactgtagcaaggtttttgggactgatagctccttgcagatccacctccgctcccacactggagagagacccttcgtgtgctctgtctgtggtcatcgcttcaccaccaagggcaacctcaaggtgcactttcaccgacatccccaggtgaaggcaaacccccagctgtttgccgagttccaggacaaagtggcggccggcaatggcatcccctatgcactctctgtacctgaccccatagatgaaccgagtctttctttagacagcaaacctgtccttgtaaccacctctgtagggctacctcagaatctttcttcggggactaatcccaaggacctcacgggtggctccttgcccggtgacctgcagcctgggccttctccagaaagtgagggtggacccacactccctggggtgggaccaaactataattccccaagggctggtggcttccaagggagtgggacccctgagccagggtcagagaccctgaaattgcagcagttggtggagaacattgacaaggccaccactgatcccaacgaatgtctcatttgccaccgagtcttaagctgtcagagctccctcaagatgcattatcgcacccacaccggggagagaccgttccagtgtaagatctgtggccgagccttttctaccaaaggtaacctgaagacacaccttggggttcaccgaaccaacacatccattaagacgcagcattcgtgccccatctgccagaagaagttcactaatgccgtgatgctgcagcaacatattcggatgcacatgggcggtcagattcccaacacgcccctgccagagaatccctgtgactttacgggttctgagccaatgaccgtgggtgagaacggcagcaccggcgctatctgccatgatgatgtcatcgaaagcatcgatgtagaggaagtcagctcccaggaggctcccagcagctcctccaaggtccccacgcctcttcccagcatccactcggcatcacccacgctagggtttgccatgatggcttccttagatgccccagggaaagtgggtcctgccccttttaacctgcagcgccagggcagcagagaaaacggttccgtggagagcgatggcttgaccaacgactcatcctcgctgatgggagaccaggagtatcagagccgaagcccagatatcctggaaaccacatccttccaggcactctccccggccaatagtcaagccgaaagcatcaagtcaaagtctcccgatgctgggagcaaagcagagagctccgagaacagccgcactgagatggaaggtcggagcagtctcccttccacgtttatccgagccccgccgacctatgtcaaggttgaagttcctggcacatttgtgggaccctcgacattgtccccagggatgacccctttgttagcagcccagccacgccgacaggccaagcaacatggctgcacacggtgtgggaagaacttctcgtctgctagcgctcttcagatccacgagcggactcacactggagagaagccttttgtgtgcaacatttgtgggcgagcttttaccaccaaaggcaacttaaaggttcactacatgacacacggggcgaacaataactcagcccgccgtggaaggaagttggccatcgagaacaccatggctctgttaggtacggacggaaaaagagtctcagaaatctttcccaaggaaatcctggccccttcagtgaatgtggaccctgttgtgtggaaccagtacaccagcatgctcaatggcggtctggccgtgaagaccaatgagatctctgtgatccagagtgggggggttcctaccctcccggtttccttgggggccacctccgttgtgaataacgccactgtctccaagatggatggctcccagtcgggtatcagtgcagatgtggaaaaaccaagtgctactgacggcgttcccaaacaccagtttcctcacttcctggaagaaaacaagattgcggtcagctaagggagaacttgcgtggaaggagcaatgcagacacagtgaaatctctagaatctgctttgttttgtaagaactcatctcctcctgttttctttttcttactgatatgcaaatgatgtttactacgttggttgtgaccacaacctcaggcaagtgctacaatcacgattgttgctatgctgctttgcaaaaagttgaaaaaataaaaaaaaaatgcataccaaaa

SEQ ID NO: 2043 - DNA, 10384 bp, Homo sapiens
gcgcccgggccgccggccgggcccgggcctgggggcggggcgggaagacggcggccgggagtgttttcagttccgcctccaatcgcccattcccctcttcccctcccagccccctccatcccatcggaagaggaaggaacaaaaggtcccggaccccccggatctgacggggcgggacctggcgccaccttgcaggttcgatacaagaggctgttttcctagcgtggcttgctgcctttggtaagaacatgtcgtccatcttgccattcacgccgccagttgtgaagagactgctgggatggaagaagtcagctggtgggtctggaggagcaggcggaggagagcagaatgggcaggaagaaaagtggtgtgagaaagcagtgaaaagtctggtgaagaagctaaagaaaacaggacgattagatgagcttgagaaagccatcaccactcaaaactgtaatactaaatgtgttaccataccaagcacttgctctgaaatttggggactgagtacaccaaatacgatagatcagtgggatacaacaggcctttacagcttctctgaacaaaccaggtctcttgatggtcgtctccaggtatcccatcgaaaaggattgccacatgttatatattgccgattatggcgctggcctgatcttcacagtcatcatgaactcaaggcaattgaaaactgcgaatatgcttttaatcttaaaaaggatgaagtatgtgtaaacccttaccactatcagagagttgagacaccagttttgcctccagtattagtgccccgacacaccgagatcctaacagaacttccgcctctggatgactatactcactccattccagaaaacactaacttcccagcaggaattgagccacagagtaattatattccagaaacgccacctcctggatatatcagtgaagatggagaaacaagtgaccaacagttgaatcaaagtatggacacaggctctccagcagaactatctcctactactctttcccctgttaatcatagcttggatttacagccagttacttactcagaacctgcattttggtgttcgatagcatattatgaattaaatcagagggttggagaaaccttccatgcatcacagccctcactcactgtagatggctttacagacccatcaaattcagagaggttctgcttaggtttactctccaatgttaaccgaaatgccacggtagaaatgacaagaaggcatataggaagaggagtgcgcttatactacataggtggggaagtttttgctgagtgcctaagtgatagtgcaatctttgtgcagagccccaattgtaatcagagatatggctggcaccctgcaacagtgtgtaaaattccaccaggctgtaatctgaagatcttcaacaaccaggaatttgctgctcttctggctcagtctgttaatcagggttttgaagccgtctatcagctaactagaatgtgcaccataagaatgagttttgtgaaagggtggggagcagaataccgaaggcagacggtaacaagtactccttgctggattgaacttcatctgaatggacctctacagtggttggacaaagtattaactcagatgggatccccttcagtgcgttgctcaagcatgtcataaagcttcaccaatcaagtcccatgaaaagacttaatgtaacaactcttctgtcatagcattgtgtgtggtccctatggactgtttactatccaaaagttcaagagagaaaacagcacttgaggtctcatcaattaaagcaccttgtggaatctgtttcctatatttgaatattagatgggaaaattagtgtctagaaatactctcccattaaagaggaagagaagattttaaagacttaatgatgtcttattgggcataaaactgagtgtcccaaaggtttattaataacagtagtagttatgtgtacaggtaatgtatcatgatccagtatcacagtattgtgctgtttatatacatttttagtttgcatagatgaggtgtgtgtgtgcgctgcttcttgatctaggcaaacctttataaagttgcagtacctaatctgttattcccacttctctgttatttttgtgtgtcttttttaatatataatatatatcaagattttcaaattatttagaagcagattttcctgtagaaaaactaatttttctgccttttaccaaaaataaactcttgggggaagaaaagtggattaacttttgaaatccttgaccttaatgtgttcagtggggcttaaacagtcattctttttgtggttttttgtttttttttgtttttttttttaactgctaaatcttattataaggaaaccatactgaaaacctttccaagcctcttttttccattcccatttttgtcctcataatcaaaacagcataacatgacatcatcaccagtaatagttgcattgatactgctggcaccagttaattctgggatacagtaagaattcatatggagaaagtccctttgtcttatgcccaaatttcaacaggaataattggcttgtataatctagcagtctgttgatttatccttccacctcataaaaaatgcataggtggcagtataattattttcagggatatgctagaattacttccacatatttatccctttttaaaaaagctaatctataaataccgtttttccaaaggtattttacaatatttcaacagcagaccttctgctcttcgagtagtttgatttggtttagtaaccagattgcattatgaaatgggccttttgtaaatgtaattgtttctgcaaaatacctagaaaagtgatgctgaggtaggatcagcagatatgggccatctgtttttaaagtatgttgtattcagtttataaattgattgttattctacacataattatgaattcagaattttaaaaattgggggaaaagccatttatttagcaagttttttagcttataagttacctgcagtctgagctgttcttaactgatcctggttttgtgattgacaatatttcatgctctgtagtgagaggagatttccgaaactctgttgctagttcattctgcagcaaataattattatgtctgatgttgactcattgcagtttaaacatttcttcttgtttgcatcttagtagaaatggaaaataaccactcctggtcgtcttttcataaattttcatatttttgaagctgtctttggtacttgttctttgaaatcatatccacctgtctctataggtatcattttcaatactttcaacatttggtggttttctattgggtactccccattttcctatatttgtgtgtatatgtatgtgttcatgtaaatttggtatagtaattttttattcattcaacaaatatttattgttcacctgtttgtaccaggaacttttcttagtctttgggtaaaggtgaacaagacaactacagttcctgcctttgctgagacagcagttacactaacccttaattatcttacttgtctatgaaggagataaacagggtactgtactggagaataacagatgggatgcttcaggtaggacatcaaggaaagcctctaaggaaaggatgcatgagctaacacctgacattaaagaagcaagccaagtgaggagccaggggagataagcattcctggcaaagagaatagcatcaaatgcaaaaaggttcacactaaaggaaactcctgattaggtattaatgctttatacagaaacctctatacaaatccaaacttgaagatcagaatggttctacagttcataacattttgaaggtggccttattttgtgatagtctgcttcatgtgattctcactaacatatctccttcctcaacctttgctgtaaaaatttcatttgcaccacatcagtactacttaatttaacaagcttttgttgtgtaagctctcactgttttagtgccctgctgcttgcttccagactttgtgctgtccagtaattatgtcttccactacccatcttgtgagcagagtaaatgtcctaggtaataccactatcaggcctgtaggagatactcagtggagcctctgcccttctttttcttacttgagaacttgtaatggtgttagggaacagttgtaggggcagaaaacaactctgaaagtggtagaaggtcctgatcttggtggttactcttgcattactgtgttaggtcaagcagtgcctactatgctgtttcagtagtggagcgcatctctacagttctgatgcgatttttctgtacagtatgaaattgggactcaactctttgaaaacacctattgagcagttatacctgttgagcagtttacttcctggttgtaattacatttgtgtgaatgtgtttgatgctttttaacgagatgatgttttttgtattttatctactgtggcctgattttttttttgttttctgcccctccccccatttataggtgtggttttcatttttctaagtgatagaatcccctctttgttgaatttttgtctttatttaaattagcaacattacttaggatttattcttcacaatactgttaattttctaggaatgatgacctgagaaccgaatggccatgctttctatcacatttctaagatgagtaatattttttccagtaggttccacagagacaccttgggggctggcttaggggaggctgttggagttctcactgacttagtggcatatttattctgtactgaagaactgcatggggtttcttttggaaagagtttcattgctttaaaaagaagctcagaaagtctttataaccactggtcaacgattagaaaaatataactggatttaggcctaccttctggaataccgctgattgtgctctttttatcctactttaaagaagctttcatgattagatttgagctatatcagttataccgattataccttataatacacattcagttagtaaacatttattgatgcctgttgtttgcccagccactgtgatggatattgaataataaaaagatgactaggacggggccctgacccttgagctgtgcttggtcttgtagaggttgtgttttttttcctcaggacctgtcactttggcagaaggaaatctgcctaatttttcttgaaagctaaattttctttgtaagtttttacaaattgtttaatacctagttgtattttttaccttaagccacattgagttttgcttgatttgtctgtcttttaaacactgtcaaatgctttcccttttgttaaaattattttaatttcactttttttgtgcccttgtcaatttaagactaagactttgaaggtaaaacaaacaaacaaacatcagtcttagtctcttgctagttgaaatcaaataaaagaaaatatatacccagttggtttctctacctcttaaaagcttcccatatatacctttaagatccttctcttttttctttaactactaaataggttcagcatttattcagtgttagataccctcttcgtctgagggtggcgtaggtttatgttgggatataaagtaacacaagacaatcttcactgtacataaaatatgtcttcatgtacagtctttactttaaaagctgaacattccaatttgcgccttccctcccaagcccctgcccaccaagtatctctttagatatctagtctgtggacatgaacaatgaatacttttttcttactctgatcgaaggcattgatacttagacatatcaaacatttcttcctttcatatgctttactttgctaaatctattatattcattgcctgaattttattcttcctttctacctgacaacacacatccaggtggtacttgctggttatcctctttcttgttagccttgttttttgttttttttttttttttttgagagggagtctcgctctgttgcccaacctggagtgcagtggtgcgatcttggttcactgcaagctccgcctcccgggttcacgccatgcttctgcctcagcctcccaagtagctgggactacaggcgcccaccaccacactcggctaattttttgtatttttagtagagacggggtttcaccgtgttggccaggatggtctcgatctcctgacctcgtgatctgtccacctcggcttcccaaagtgctgggattacaggcatgagccaccgcgcccagcctagccatatttttatctgcatatatcagaatgtttctctcctttgaacttattaacaaaaaaggaacatgcttttcatacctagagtcctaatttcttcatcatgaaggttgctattcaaattgatcaatcattttaattttacaaatggctcaaaaattctgttcagtaaatgtctttgtgactggcaaatggcataaattatgtttaagattatgaacttttctgacagttgcagccaatgttttccctacgataccagatttccatcttggggcatattggattgttgtatttaagacagtcagaataatgatagtgtgtggtctccagaggtagtcagaatcctgctattgagttctttttatatcttccttttcaattttttattaccattttgtttgtttagactacactttgtagggattgaggggcaaattatctcttggagtggaattcctgtgttttgagccttacaaccaggaaatatgagctatactagatagcctcatgatagcatttacgataagaacttatctcgtgtgttcatgtaattttttgagtaggaactgttttatcttgaatattgtagctaactatatatagcagaactgcctcagtctttttaagaaggaaataaataatatatgtgtatgaatttatatatacatatacactcatagacaaacttaacagttggggtcattctaacagttaaaacaattgttccattgtttaaatctcagatcctggtaaaatgttcttaatttgtctgtgtacattttcctttcatggacagaccattggagtacattaattttcttaatctgccatttggcagttcatttaatataccattttttggcaacttggtaactaagaatcacagccaaaatttgttaacatcaaagaaagctctgccatataccccgttactaaattattatacatccagcagattctgggatgtactaacttagggttaactttgttgttgttgataatactagattgctccctctttaattcttcttctggtgcaaggttgctgcttaagttaccctgggaaatactactacaaggtcaaattttctagtatcttacagcctgattgaaggtgattcagatctttgctcaatataaatggattttccaagattctctgggccatccttgacccacaggtgatctcgctggagtatattaacttaacttcagtgccagttggtttggtgccatgagatccataatgaatccagaacttcaccattgcttagatataagagtcccttggaagaataatgccactgatgatgggggtcagaaggtgtattaactcaacatagagggcttttagatttttcttcaaaaaaatttcgagaaaagtattcttttaccctccaaacagttaacagctcttagtttctccaaatatgctctttgatttacttatttttaattaaagatggtaatttattgaacaatgaaatccgtaatatattgatttaaggacaaaagtgaagttttagaattataaaagtacttaaatattatatattttccatttcataattgttttcctttctctgtggctttaaagtttttgactattttacaatgttaatcactaggtaacttgccatatttctggttctatattaagttctatcctttataatgctgttattataaagctggtttttagcatttgtctgtagcaatagaaattttactaagtctctgttctcccagtaagttttttcttttctcagtaagtccctaagaaaacatttgtttgccactcttactattcccaatcttggattgttcgagctgaaaaaaaatttgatgagaaacaggaggatccttttctggtgaatataggttcctgctttaagaatgtggaaatccattgctttatataactaatatacacacagattaattaaaattgtgagaaataattcacacatgacaagtaggtaacatgcatgagttttgaatttttttaaaaacccaactgtttgacaaaatatagaacccaaattggtactttcttagaccagtgtaacctcacacctcagttttgcttttccaaccctgacttgaaaggcatatttgtatctttttattagtgatagtgaagctgtgacactaaccttttatacaaaagagtaaagaaagaaaaactacagcgattaagatgagaacagttctgcagttgttgaactagatcacagcattgtaggcagaataaaaaatgttcatatctgagaatattcctttcgccatcttttcccaaggccagacctcctggtggagcacagttaaaagtaacattctgggcctttgtaatcggagggctgtgtctccagctggcagcctttgttttaatatataatgcaggactgtggaaaacagttggcatagaatattttcacctaaaaaagaaagaaaagacatacaaaactggattaattgcaaaaagagaatacagtaaaataccatataactggacaaagctagaagaacctttagaagatttgtctgaaaacagatttcaagagtgagcttttatacactgctcactaatttgcttgattactaccaactcttcttaaagttaacacgtttaaggtatttctggacttcctagccttttagcaagcttagaggaactagccattagctagtgatgtaaaaatattttggggactgatgcccttaaaggttatgcccttgaaagttcttaccttttctctagtgatattaaggaacgagtgggtagtgttctcagggtgaccagctgccctaaagtgcctgggattgagggtttccctggatgcgggactttccctggatacaaaacttttagcagagttttgtatatatgtggatttttctgataagtagcacatcagaggccttaaccactgcccaaaagcgattctccattgagagtacatatcttgaacttaagaaattcatttgctctgatttttaatcttgtaaagtttttgctaaactcaaaacaagtcccaggcacaccagaaggagctgaccaccttaggtgttcttgtgatttatccttacttccctatgttgtcatagttgcttctaaactcagctgcactatggctgtcaacatttctgatacttattgggatatgtgccatccagtcatttagtactttgaatggaacatgagatttataacacaggtaatagctgaaggtaccagtatggtggtgagactcacacttagtgatccagctaaggtaactgatgttataatggaacagagaagaggccaactagatagctaagttcttctgaacctatgtgtatatgtaagtacaaatcatgcgtccttatggggttaaacttaatctgaaatttacatttttcatagtaaaaggaaaccaattgttgcagatttcttttcttgtgaggaaatacatggcctttgatgctctggcgtctactgcatttcccagtctgttctgctcgagaagccagaatgtgttgttaacatttttccgtgaatgttgtgttaaaatgattaaatgcatcagccaatggcaagtgaaggaattgggtgtcctgatgcagactgagcagtttctctcaattgtagcctcatactcataaggtgcttaccagctagaacattgagcacgtgaggtgagattttttttctctgatggcattaactttgtaatgcaatatgatggatgcagaccctgttcttgtttccctctggaagtccttagtggctgcatccttggtgcactgtgatggagatattaaatgtgttctttgtgagctttcgttctatgattgtcaaaagtacgatgtggttccttttttatttttattaaacaatgagctgaggctttattacagctggttttcaagttaaaattgttgaatactgatgtctttctcccacctacaccaaatattttagtctatttaaagtacaaaaaaagttctgcttaagaaaacattgcttacatgtcctgtgatttctggtcaatttttatatatatttgtgtgcatcatctgtatgtgctttcactttttaccttgtttgctcttacctgtgttaacagccctgtcaccgttgaaaggtggacagttttcctagcattaaaagaaagccatttgagttgtttaccatgtta

SEQ ID NO: 2044 - DNA, 10531 bp, Homo sapiens
gggaggcggggcgggccgtaggcaaagggaggtggggaggcggtggccggcgactccccgcgccccgctcgccccccggcccttcccgcggtgctcggcctcgttcctttcctcctccgctccctccgtcttccatacccgccccgcgcggctttcggccggcgtgcctcgcgccctaacgggcggctggaggcgccaatcagcgggcggcagggtgccagccccggggctgcgccggcgaatcggcggggcccgcggcccagggtggcaggcgggtctacccgcgcggccgcggcggcggagaagcagctcgccagccagcagcccgccagccgccgggaggttcgatacaagaggctgttttcctagcgtggcttgctgcctttggtaagaacatgtcgtccatcttgccattcacgccgccagttgtgaagagactgctgggatggaagaagtcagctggtgggtctggaggagcaggcggaggagagcagaatgggcaggaagaaaagtggtgtgagaaagcagtgaaaagtctggtgaagaagctaaagaaaacaggacgattagatgagcttgagaaagccatcaccactcaaaactgtaatactaaatgtgttaccataccaagcacttgctctgaaatttggggactgagtacaccaaatacgatagatcagtgggatacaacaggcctttacagcttctctgaacaaaccaggtctcttgatggtcgtctccaggtatcccatcgaaaaggattgccacatgttatatattgccgattatggcgctggcctgatcttcacagtcatcatgaactcaaggcaattgaaaactgcgaatatgcttttaatcttaaaaaggatgaagtatgtgtaaacccttaccactatcagagagttgagacaccagttttgcctccagtattagtgccccgacacaccgagatcctaacagaacttccgcctctggatgactatactcactccattccagaaaacactaacttcccagcaggaattgagccacagagtaattatattccagaaacgccacctcctggatatatcagtgaagatggagaaacaagtgaccaacagttgaatcaaagtatggacacaggctctccagcagaactatctcctactactctttcccctgttaatcatagcttggatttacagccagttacttactcagaacctgcattttggtgttcgatagcatattatgaattaaatcagagggttggagaaaccttccatgcatcacagccctcactcactgtagatggctttacagacccatcaaattcagagaggttctgcttaggtttactctccaatgttaaccgaaatgccacggtagaaatgacaagaaggcatataggaagaggagtgcgcttatactacataggtggggaagtttttgctgagtgcctaagtgatagtgcaatctttgtgcagagccccaattgtaatcagagatatggctggcaccctgcaacagtgtgtaaaattccaccaggctgtaatctgaagatcttcaacaaccaggaatttgctgctcttctggctcagtctgttaatcagggttttgaagccgtctatcagctaactagaatgtgcaccataagaatgagttttgtgaaagggtggggagcagaataccgaaggcagacggtaacaagtactccttgctggattgaacttcatctgaatggacctctacagtggttggacaaagtattaactcagatgggatccccttcagtgcgttgctcaagcatgtcataaagcttcaccaatcaagtcccatgaaaagacttaatgtaacaactcttctgtcatagcattgtgtgtggtccctatggactgtttactatccaaaagttcaagagagaaaacagcacttgaggtctcatcaattaaagcaccttgtggaatctgtttcctatatttgaatattagatgggaaaattagtgtctagaaatactctcccattaaagaggaagagaagattttaaagacttaatgatgtcttattgggcataaaactgagtgtcccaaaggtttattaataacagtagtagttatgtgtacaggtaatgtatcatgatccagtatcacagtattgtgctgtttatatacatttttagtttgcatagatgaggtgtgtgtgtgcgctgcttcttgatctaggcaaacctttataaagttgcagtacctaatctgttattcccacttctctgttatttttgtgtgtcttttttaatatataatatatatcaagattttcaaattatttagaagcagattttcctgtagaaaaactaatttttctgccttttaccaaaaataaactcttgggggaagaaaagtggattaacttttgaaatccttgaccttaatgtgttcagtggggcttaaacagtcattctttttgtggttttttgtttttttttgtttttttttttaactgctaaatcttattataaggaaaccatactgaaaacctttccaagcctcttttttccattcccatttttgtcctcataatcaaaacagcataacatgacatcatcaccagtaatagttgcattgatactgctggcaccagttaattctgggatacagtaagaattcatatggagaaagtccctttgtcttatgcccaaatttcaacaggaataattggcttgtataatctagcagtctgttgatttatccttccacctcataaaaaatgcataggtggcagtataattattttcagggatatgctagaattacttccacatatttatccctttttaaaaaagctaatctataaataccgtttttccaaaggtattttacaatatttcaacagcagaccttctgctcttcgagtagtttgatttggtttagtaaccagattgcattatgaaatgggccttttgtaaatgtaattgtttctgcaaaatacctagaaaagtgatgctgaggtaggatcagcagatatgggccatctgtttttaaagtatgttgtattcagtttataaattgattgttattctacacataattatgaattcagaattttaaaaattgggggaaaagccatttatttagcaagttttttagcttataagttacctgcagtctgagctgttcttaactgatcctggttttgtgattgacaatatttcatgctctgtagtgagaggagatttccgaaactctgttgctagttcattctgcagcaaataattattatgtctgatgttgactcattgcagtttaaacatttcttcttgtttgcatcttagtagaaatggaaaataaccactcctggtcgtcttttcataaattttcatatttttgaagctgtctttggtacttgttctttgaaatcatatccacctgtctctataggtatcattttcaatactttcaacatttggtggttttctattgggtactccccattttcctatatttgtgtgtatatgtatgtgttcatgtaaatttggtatagtaattttttattcattcaacaaatatttattgttcacctgtttgtaccaggaacttttcttagtctttgggtaaaggtgaacaagacaactacagttcctgcctttgctgagacagcagttacactaacccttaattatcttacttgtctatgaaggagataaacagggtactgtactggagaataacagatgggatgcttcaggtaggacatcaaggaaagcctctaaggaaaggatgcatgagctaacacctgacattaaagaagcaagccaagtgaggagccaggggagataagcattcctggcaaagagaatagcatcaaatgcaaaaaggttcacactaaaggaaactcctgattaggtattaatgctttatacagaaacctctatacaaatccaaacttgaagatcagaatggttctacagttcataacattttgaaggtggccttattttgtgatagtctgcttcatgtgattctcactaacatatctccttcctcaacctttgctgtaaaaatttcatttgcaccacatcagtactacttaatttaacaagcttttgttgtgtaagctctcactgttttagtgccctgctgcttgcttccagactttgtgctgtccagtaattatgtcttccactacccatcttgtgagcagagtaaatgtcctaggtaataccactatcaggcctgtaggagatactcagtggagcctctgcccttctttttcttacttgagaacttgtaatggtgttagggaacagttgtaggggcagaaaacaactctgaaagtggtagaaggtcctgatcttggtggttactcttgcattactgtgttaggtcaagcagtgcctactatgctgtttcagtagtggagcgcatctctacagttctgatgcgatttttctgtacagtatgaaattgggactcaactctttgaaaacacctattgagcagttatacctgttgagcagtttacttcctggttgtaattacatttgtgtgaatgtgtttgatgctttttaacgagatgatgttttttgtattttatctactgtggcctgattttttttttgttttctgcccctccccccatttataggtgtggttttcatttttctaagtgatagaatcccctctttgttgaatttttgtctttatttaaattagcaacattacttaggatttattcttcacaatactgttaattttctaggaatgatgacctgagaaccgaatggccatgctttctatcacatttctaagatgagtaatattttttccagtaggttccacagagacaccttgggggctggcttaggggaggctgttggagttctcactgacttagtggcatatttattctgtactgaagaactgcatggggtttcttttggaaagagtttcattgctttaaaaagaagctcagaaagtctttataaccactggtcaacgattagaaaaatataactggatttaggcctaccttctggaataccgctgattgtgctctttttatcctactttaaagaagctttcatgattagatttgagctatatcagttataccgattataccttataatacacattcagttagtaaacatttattgatgcctgttgtttgcccagccactgtgatggatattgaataataaaaagatgactaggacggggccctgacccttgagctgtgcttggtcttgtagaggttgtgttttttttcctcaggacctgtcactttggcagaaggaaatctgcctaatttttcttgaaagctaaattttctttgtaagtttttacaaattgtttaatacctagttgtattttttaccttaagccacattgagttttgcttgatttgtctgtcttttaaacactgtcaaatgctttcccttttgttaaaattattttaatttcactttttttgtgcccttgtcaatttaagactaagactttgaaggtaaaacaaacaaacaaacatcagtcttagtctcttgctagttgaaatcaaataaaagaaaatatatacccagttggtttctctacctcttaaaagcttcccatatatacctttaagatccttctcttttttctttaactactaaataggttcagcatttattcagtgttagataccctcttcgtctgagggtggcgtaggtttatgttgggatataaagtaacacaagacaatcttcactgtacataaaatatgtcttcatgtacagtctttactttaaaagctgaacattccaatttgcgccttccctcccaagcccctgcccaccaagtatctctttagatatctagtctgtggacatgaacaatgaatacttttttcttactctgatcgaaggcattgatacttagacatatcaaacatttcttcctttcatatgctttactttgctaaatctattatattcattgcctgaattttattcttcctttctacctgacaacacacatccaggtggtacttgctggttatcctctttcttgttagccttgttttttgttttttttttttttttttgagagggagtctcgctctgttgcccaacctggagtgcagtggtgcgatcttggttcactgcaagctccgcctcccgggttcacgccatgcttctgcctcagcctcccaagtagctgggactacaggcgcccaccaccacactcggctaattttttgtatttttagtagagacggggtttcaccgtgttggccaggatggtctcgatctcctgacctcgtgatctgtccacctcggcttcccaaagtgctgggattacaggcatgagccaccgcgcccagcctagccatatttttatctgcatatatcagaatgtttctctcctttgaacttattaacaaaaaaggaacatgcttttcatacctagagtcctaatttcttcatcatgaaggttgctattcaaattgatcaatcattttaattttacaaatggctcaaaaattctgttcagtaaatgtctttgtgactggcaaatggcataaattatgtttaagattatgaacttttctgacagttgcagccaatgttttccctacgataccagatttccatcttggggcatattggattgttgtatttaagacagtcagaataatgatagtgtgtggtctccagaggtagtcagaatcctgctattgagttctttttatatcttccttttcaattttttattaccattttgtttgtttagactacactttgtagggattgaggggcaaattatctcttggagtggaattcctgtgttttgagccttacaaccaggaaatatgagctatactagatagcctcatgatagcatttacgataagaacttatctcgtgtgttcatgtaattttttgagtaggaactgttttatcttgaatattgtagctaactatatatagcagaactgcctcagtctttttaagaaggaaataaataatatatgtgtatgaatttatatatacatatacactcatagacaaacttaacagttggggtcattctaacagttaaaacaattgttccattgtttaaatctcagatcctggtaaaatgttcttaatttgtctgtgtacattttcctttcatggacagaccattggagtacattaattttcttaatctgccatttggcagttcatttaatataccattttttggcaacttggtaactaagaatcacagccaaaatttgttaacatcaaagaaagctctgccatataccccgttactaaattattatacatccagcagattctgggatgtactaacttagggttaactttgttgttgttgataatactagattgctccctctttaattcttcttctggtgcaaggttgctgcttaagttaccctgggaaatactactacaaggtcaaattttctagtatcttacagcctgattgaaggtgattcagatctttgctcaatataaatggattttccaagattctctgggccatccttgacccacaggtgatctcgctggagtatattaacttaacttcagtgccagttggtttggtgccatgagatccataatgaatccagaacttcaccattgcttagatataagagtcccttggaagaataatgccactgatgatgggggtcagaaggtgtattaactcaacatagagggcttttagatttttcttcaaaaaaatttcgagaaaagtattcttttaccctccaaacagttaacagctcttagtttctccaaatatgctctttgatttacttatttttaattaaagatggtaatttattgaacaatgaaatccgtaatatattgatttaaggacaaaagtgaagttttagaattataaaagtacttaaatattatatattttccatttcataattgttttcctttctctgtggctttaaagtttttgactattttacaatgttaatcactaggtaacttgccatatttctggttctatattaagttctatcctttataatgctgttattataaagctggtttttagcatttgtctgtagcaatagaaattttactaagtctctgttctcccagtaagttttttcttttctcagtaagtccctaagaaaacatttgtttgccactcttactattcccaatcttggattgttcgagctgaaaaaaaatttgatgagaaacaggaggatccttttctggtgaatataggttcctgctttaagaatgtggaaatccattgctttatataactaatatacacacagattaattaaaattgtgagaaataattcacacatgacaagtaggtaacatgcatgagttttgaatttttttaaaaacccaactgtttgacaaaatatagaacccaaattggtactttcttagaccagtgtaacctcacacctcagttttgcttttccaaccctgacttgaaaggcatatttgtatctttttattagtgatagtgaagctgtgacactaaccttttatacaaaagagtaaagaaagaaaaactacagcgattaagatgagaacagttctgcagttgttgaactagatcacagcattgtaggcagaataaaaaatgttcatatctgagaatattcctttcgccatcttttcccaaggccagacctcctggtggagcacagttaaaagtaacattctgggcctttgtaatcggagggctgtgtctccagctggcagcctttgttttaatatataatgcaggactgtggaaaacagttggcatagaatattttcacctaaaaaagaaagaaaagacatacaaaactggattaattgcaaaaagagaatacagtaaaataccatataactggacaaagctagaagaacctttagaagatttgtctgaaaacagatttcaagagtgagcttttatacactgctcactaatttgcttgattactaccaactcttcttaaagttaacacgtttaaggtatttctggacttcctagccttttagcaagcttagaggaactagccattagctagtgatgtaaaaatattttggggactgatgcccttaaaggttatgcccttgaaagttcttaccttttctctagtgatattaaggaacgagtgggtagtgttctcagggtgaccagctgccctaaagtgcctgggattgagggtttccctggatgcgggactttccctggatacaaaacttttagcagagttttgtatatatgtggatttttctgataagtagcacatcagaggccttaaccactgcccaaaagcgattctccattgagagtacatatcttgaacttaagaaattcatttgctctgatttttaatcttgtaaagtttttgctaaactcaaaacaagtcccaggcacaccagaaggagctgaccaccttaggtgttcttgtgatttatccttacttccctatgttgtcatagttgcttctaaactcagctgcactatggctgtcaacatttctgatacttattgggatatgtgccatccagtcatttagtactttgaatggaacatgagatttataacacaggtaatagctgaaggtaccagtatggtggtgagactcacacttagtgatccagctaaggtaactgatgttataatggaacagagaagaggccaactagatagctaagttcttctgaacctatgtgtatatgtaagtacaaatcatgcgtccttatggggttaaacttaatctgaaatttacatttttcatagtaaaaggaaaccaattgttgcagatttcttttcttgtgaggaaatacatggcctttgatgctctggcgtctactgcatttcccagtctgttctgctcgagaagccagaatgtgttgttaacatttttccgtgaatgttgtgttaaaatgattaaatgcatcagccaatggcaagtgaaggaattgggtgtcctgatgcagactgagcagtttctctcaattgtagcctcatactcataaggtgcttaccagctagaacattgagcacgtgaggtgagattttttttctctgatggcattaactttgtaatgcaatatgatggatgcagaccctgttcttgtttccctctggaagtccttagtggctgcatccttggtgcactgtgatggagatattaaatgtgttctttgtgagctttcgttctatgattgtcaaaagtacgatgtggttccttttttatttttattaaacaatgagctgaggctttattacagctggttttcaagttaaaattgttgaatactgatgtctttctcccacctacaccaaatattttagtctatttaaagtacaaaaaaagttctgcttaagaaaacattgcttacatgtcctgtgatttctggtcaatttttatatatatttgtgtgcatcatctgtatgtgctttcactttttaccttgtttgctcttacctgtgttaacagccctgtcaccgttgaaaggtggacagttttcctagcattaaaagaaagccatttgagttgtttaccatgtta

SEQ ID NO: 2045 - DNA, 3601 bp, Homo sapiens
aacacgacagcggctgccgagcgacccggaagtattcccattttgcgttgtctgggctcggcggcagccgggctcggagtggacgtgccactatggggtcgtccaagaagcatcgcggagagaaggaggcggccgggacgacggcggcggccggcaccgggggtgccaccgagcagccgccgcggcaccgggaacacaaaaaacacaagcaccggagtggcggcagtggcggtagcggtggcgaacgacggaagcggagccgggaacgtgggggcgagcgcgggagcgggcggcgcggggccgaagctgaggcccggagcagcacgcacgggcgggagcgcagccaggcagagccctccgagcggcgcgtgaagcgggagaagcgcgatgacggctacgaggccgctgccagctccaaaactagctcaggcgatgcctcctcactcagcatcgaggagactaacaaactccgggcaaagttggggctgaaacccttggaggttaatgccatcaagaaggaggcgggcaccaaggaggagcccgtgacagctgatgtcatcaaccctatggccttgcgacagcgagaggagctgcgggagaagctggcggctgccaaggagaagcgcctgctgaaccaaaagctggggaagataaagaccctaggagaggatgacccctggctggacgacactgcagcctggatcgagaggagccggcagctgcagaaggagaaggacctggcagagaagagggccaagttactggaggagatggaccaagagtttggtgtcagcactctggtggaggaggagttcgggcagaggcggcaggacctgtacagtgcccgggacctgcagggcctcaccgtggagcatgccattgattccttccgagaaggggagacaatgattcttaccctcaaggacaaaggcgtgctgcaggaggaggaggacgtgctggtgaacgtgaacctggtggataaggagcgggcagagaaaaatgtggagctgcggaagaagaagcctgactacctgccctatgccgaggacgagagcgtggacgacctggcgcagcaaaaacctcgctctatcctgtccaagtatgacgaagagcttgaaggggagcggccacattccttccgcttggagcagggcggcacggctgatggcctgcgggagcgggagctggaggagatccgggccaagctgcggctgcaggctcagtccctgagcacagtggggccccggctggcctccgaatacctcacgcctgaggagatggtgacctttaaaaagaccaagcggagggtgaagaaaatccgcaagaaggagaaggaggtagtagtgcgggcagatgacttgctgcctctcggggaccagactcaggatggggactttggttccagactgcggggacggggtcgccgccgagtgtccgaagtggaggaggagaaggagcctgtgcctcagcccctgccgtcggacgacacccgagtggagaacatggacatcagtgatgaggaggaaggtggagctccaccgccggggtccccgcaggtgctggaggaggacgaggcggagctggagctgcagaagcagctggagaagggacgccggctgcgacagttacagcagctacagcagctgcgagacagtggcgagaaggtggtggagattgtgaagaagctggagtctcgccagcggggctgggaggaggatgaggatcccgagcggaagggggccatcgtgttcaacgccacgtccgagttctgccgcaccttgggggagatccccacctacgggctggctggcaatcgcgaggagcaggaggagctcatggactttgaacgggatgaggagcgctcagccaacggtggctccgaatctgacggggaggagaacatcggctggagcacggtgaacctggacgaggagaagcagcagcaggatttctctgcttcctccaccaccatcctggacgaggaaccgatcgtgaatagggggctggcagctgccctgctcctgtgtcagaacaaagggctgctggagaccacagtgcagaaggtggcccgggtgaaggcccccaacaagtcgctgccctcagccgtgtactgcatcgaggataagatggccatcgatgacaagtacagccggagggaggaataccgaggcttcacacaggacttcaaggagaaggacggctacaaacccgacgttaagatcgaatacgtggatgagacgggccggaaactcacacccaaggaggctttccggcagctgtcgcaccgcttccatggcaagggctcaggcaagatgaagacagagcggcggatgaagaagctggacgaggaggcgctcctgaagaagatgagctccagcgacacgcccctgggcaccgtggccctgctccaggagaagcagaaggctcagaagaccccctacatcgtgctcagcggcagcggcaagagcatgaacgcgaacaccatcaccaagtgacagcgccctcccgccccggccctgcctcaaccttcatattaaataaagctccctccttattttttcctccctggtcgtggtacagattccagggttggatctttggttgggtgtggcacagagtctggctcctgctaggtgagacctggccatcaaatgacacaaacaactaaacgatggaagagagagcgagcccgggtcctctaaggctccttccttctcccctggctgtcggtcacacctctgcagggccggctctctgatagaaagtggaaggcggttttagaaactcatcaccctgctctctcctggcctcgggggctgcacaggtcactgtcctgtaatgtctcccggtcagggcagcccaggactgcccagcctggtgggctggggattgggctttgggtagggcacaggtgccaccttctgtcctggctgtcctgtgccaccctggtctgtgtctagaggagtgaaactcccagggttgggctgggagtatttggtgcacgcggtatggggagggctgagctcagtgcctcctgggagacttgtcccgtgtacagtgacccagaaagatgagattccttggcctgaactctgtgatagagtgtgactgagctgctgggggacatgtgagcctcaaatccatagaaagacaaacggccaccttgggtgcccaggatactggtgcctggccccacgtacacccacatacttctcagatggctcccacattttaagattttaaaaatgaaaccaaaaaataaattgaagaaaactgtaaactttaaagaataatcagctgggcgcagtggctcatgcttgtaatcacagcactttaggaggctgaggcaggaggactgtttgagcccaggagtttgagaccaacctgagtaaggtggcaaaaccccatctctaccaaaaatacaaagattagccaggcgtggtggtgagcgcctgtagtcccagctacttgggatgctgaggtgggaggatcacttgaacctgggagacacaggctgcagtgggccctgattgagccaccacactgcagcctaggtgacagtcagaccctgtctcaaaaaaaataaaaaaaatttaaaata

SEQ ID NO: 2046 - DNA, 1170 bp, Homo sapiens
agagtagaggcggcggcggcggcggccggacccagactggtagtgaggctttggaccccgagccgctgcaatgccgctggagctggagctgtgtcccgggcgctgggtgggcgggcaacacccgtgcttcatcattgccgagatcggccagaaccaccagggcgacctggacgtagccaagcgcatgatccgcatggccaaggagtgtggggctgattgtgctaagttccagaagagtgagctagaattcaagtttaatcggaaagccttggagaggccatacacctcgaagcattcctgggggaagacgtacggggagcacaaacgacatctggagttcagccatgaccagtacagggagctgcagaggtacgccgaggaggttgggatcttcttcactgcctctggcatggatgagatggcagttgaattcctgcatgaactgaatgttccatttttcaaagttggatctggagacactaataattttccttatctggaaaagacagccaaaaaaggtcgcccaatggtgatctccagtgggatgcagtcaatggacaccatgaagcaagtttatcagatcgtgaagcccctcaaccccaacttctgcttcttgcagtgtaccagcgcatacccgctccagcctgaggacgtcaacctgcgggtcatctcggaatatcagaagctctttcctgacattcccatagggtattctgggcatgaaacaggcatagcgatatctgtggccgcagtggctctgggggccaaggtgttggaacgtcacataactttggacaagacctggaaggggagtgaccactcggcctcgctggagcctggagaactggccgagctggtgcggtcagtgcgtcttgtggagcgtgccctgggctccccaaccaagcagctgctgccctgtgagatggcctgcaatgagaagctgggcaagtctgtggtggccaaagtgaaaattccggaaggcaccattctaacaatggacatgctcaccgtgaaggtgggtgagcccaaaggctatcctcctgaagacatctttaatctagtgggcaagaaggtcctggtcactgttgaagaggatgacaccatcatggaagaattggtagataatcatggcaaaaaaatcaagtcttaaaaataaagtgccattctctg

SEQ ID NO: 2047 - DNA, 2938 bp, Homo sapiens
cggacgcgtgggcaggcagcagccgggcagggatgctcctgcgctcccgggcggcctcgggcccagccacctgctcgccggggaagaggacacgcagaggagcagctggcttgcccggagtcctcccaccttgacccaagcatgcagggcccaccccgcagcctccgcgctgggctcagcctggacgacttcatccctggccacctccagtcccacatagggtcttcctcccgggggacacgggtgcccgtgatccggaatggtggctccaacacccttaatttccagttccacgaccccgcgcccaggactgtgtgcaatgggggctacacaccaagacgagatgcttcccagcacccggaccctgcgtggtatcagacctggccaggccctgggagcaagccctctgcaagcacaaagatccctgcctcccagcacacccagaactggtcagccacgtggaccaaggacagcaagcgtcgggacaagcgctgggtcaagtacgagggaatcgggcccgtggacgagagcggcatgcccattgccccccgatccagcgttgacagacccagagactggtaccggagaatgttccagcagattcaccggaaaatgccagacttgcagctggactggaccttcgaggagccacccagagaccccaggcatctaggagcccagcaaagacctgcccacaggcccggcccggcaacatcttccagtggaagaagctgggaccactctgaagagttacctagaagcaccttcaactacagacctggagcattctccactgtgctgcagccctcaaatcaggtgctcagacgccgggaaaaagtagacaatgtctggacggaagagtcctggaaccagtttctgcaggaactagagactgggcagaggcccaagaaaccgctggtggacgaccctggtgagaagccctcccagcccattgaggtgctgctggagagagagctggccgagctgagcgccgagctggacaaggacctgcgggcaattgagacccgactgccgtcccccaagagctcgccggcgccccgacgggccccggagcagcggcccccggccggcccggcctcagcctggagctccagctacccacatgcaccttacctgggttccgcccggtccctgagtccccacaaaatggctgatggaggaagccccttcctaggtcggagggactttgtctacccttcctcaacccgagaccctagtgcctctaacggagggggcagcccagccaggagggaagagaagaagagaaaggccgccaggctcaagtttgacttccaggcgcagtcccccaaggagctgactctgcagaagggtgacattgtctacatccacaaggaggtggacaagaactggctggagggagagcaccacggccgcctgggcatcttccctgctaattatgtggaggtgctgcccgcagatgagatccctaagcccatcaagcccccgacctaccaggtgctggagtatggagaggctgtggcccagtacaccttcaagggggacctggaggtggagctgtccttccgcaagggagagcacatctgcctgatccgcaaggtgaacgagaactggtacgagggacgcatcacgggcacggggcgccaaggcatattccctgccagctacgtgcaggtgtctcgtgaaccccggctccggctctgtgacgacggcccccagctccccacgtctccccgcctgaccgctgccgcccgctcagcccgtcaccccagctccccctcagccctgcgcagcccagctgaccccaccgacttggggggacagacctccccccgtcgcactggcttctccttccccacccaggagcctagaccccagacccagaatcttggcacccctggtccagctctgtcccactctcgaggtcccagccatcccctggacctggggacctcctctcctaacacctctcagatacactggaccccgtaccgggcgatgtaccagtacaggccccagaacgaagacgagctggagctgcgcgagggggacagggtggatgtcatgcagcagtgtgacgatggctggtttgtgggtgtctcccggaggacccagaaattcggaacgttccctggaaattacgttgccccggtgtgagtggtctccatggcaacttggagccagccaggatggggtggggagcggtggcactcgtgggagggagaggacccccgcccacatcctccttccccaggacctgagctcccagcatctgcagacgacccccgcagcatttccctcggacccccctcgaagccccctggactgattcccacccacgactcacaggcattcctcccacagccctttcatttcctccccaccccactccccaaatacagaggtctgctttgaagcggagaccatttccaggccttattgagaccagaccccaagtcccccacccccatcctgctccagcgtttcctctaacagggaccagctctccgctttgcccccacggggttcctctaaccagaaccagcttcctagcctcgtagagaccaaaggccgcccccgcctgctggggttcctcccagcaccccagcttgctggctgccctctttgccttctggcctccagctgggtgtgggggggcggagcaaggcgggggacagacgcagcaccttcttagcgatctaggcctggcaagagctctggccccaaggcctcctcttcccaggggctgccaagtcctggccctggccctggcatatcaccccgcactgtggggccaggcaccactagcctggctcaaatattccccagggagactgctgtgtgctgcccgcctgcctgctggctctcccccagccccacatcccctctggaagagaatgtaaaataaacctggacacaagggccttcgtggcctcga

SEQ ID NO: 2048 - DNA, 3258 bp, Homo sapiens
gccgaatagccgtgtttgggacctgggctcgggcttcttgcgtccccgctaagaacatgtcacggggccgaatcgtccgtattctctcagcttcaagctcctctacttttcaaccaggtcactagcccttgactcctcttatcaaacttccggaactgccaccccaccagtgactccacaggcaccagggcatgcaacagggctgggacaggaaggctctcttcttcacctcaagcctgctgggctaacacttgcgatttttactagagttaactttgtaatgtatgtctctgactctagaatttcaagagaagttccacttagtgactcctaagtggaagttctaagatggcttcccagtgaggtgatgaagaggtttgagctttagagtgcagttgcaaagctcttctctgacctgaacaatggctgtagctgtggaccaacaaatccagactccttcagtacaagatctccaaatagttaaactggaagaagattcccactgggagcaggaaatttcccttcaagggaattaccctggaccagagacatcctgccagagcttttggcatttccgttaccaagaagcatcacgaccccgagaggccctcctccagctccagaagctctgttgtcagtggctaaggccagagaagtgtacaaaagagcagatcctggagttgctggtcctagaacagttcccgactgtccttctccaggagatccagatctgggtcagacagcagcatccggagagtggagaggaggcagtggccctggtggaagacttgcagaaagaacctggaagacagaggctggagcctcgggcgaggccgtccggccgcacccctcctgctcagctgcggtcgccatggccaatgacagctgcgggcccggcgagccgagctcgagcgagcgagaccggcagtactgcgagctgtgcgggaagatggagaacctgctgcgctgcagccgcagctccttctgctgcaaggagcgccagcgccaggactggaagaagcacaagctcgtgtgccagggcagcgagggcgccctcggccacggagggggccctcaccaggactccggccccgcgccgcccgctgcagcgccgccgtccagggaccgggccctggaggccaggaaggcagcgaggcgccgggacagcgcctccggggacgcagccaaggcaaaggccaagtccgcggccgaccccgcggcggccgcgtccccgcctcgcgcgtccccgggccggacaaaagccatggctgcttgttatccggtcaatggaacgggttatgtacgtcatgttgataatccaaatggagacggaagacgtgtgaaatgtattacattacgttaaagaacgggatgccaaggtaagtggaggtatacttcgaatttttctagaaggtaaagcctagtttgctgacattgaacccaaatttgatagactgctgtttttctggtctgaccatcgcaaccctcatgaagtacaaccagcatatgctacaaagtacgcaataactgtttggtatttgatgcagatgagagagcacgagctaaagtaaaatatctaacaggtgaaaaaggtgtgaggattgaactcaataaaccttcagattcagtcagtaaagacgtcttatagagcctttgatccagcaataccccacttcacctacaataattgttgacgctatttgttaatttgtgaatacgaataaatgggataaagaaaaatagacaaccagttcgcattttagtaaggaaacaaacaactttgtgtgttgcatcaaacagaagattctgactgctgtgactttgtaccgcatgatcaacttagaatctgtgattgcttacaggaagaagataagctactaatagaaaatgtttttacctctggatatgaaataagtgccctgtgtagaatttttttcattcttatattttgccagatctgttacgtagctgagttaatttcatctctacttttttaatatatgtcaagtttgaattggaataatttttctatgattaggtacaatttatcaaaactgaattgagaaaaaattacagtatttctcaaaataacgtcaatctatttttgtaaacctcttcatactattaaattttgccctaaaagacctcttaataatgattgttgccagtgactgattaattttattttacttaaaataagaaaaggagcactttaattacaactgaaaaatcagattgttttgcagtccttcctatcttacactaatttgaactcttaaagattgctgcttttttttgatattgtcaataatgaaacccaattgtaaaacagtcaccatttactaccagtaacttttagttaatgtcttacaaggaaaaagacacaataagaagagtttaattttttttttttttttgagcctgggcgacagagtgagactccgtctcaaaaaaaaaaaaaaaaagaaatgtttcattttggtttttcaccaaccttcctttgataggacaaagcagatactaagagggggaggaaaggctgttctgtgtctgaacccagttgggctagtccccaagaggagctgagagccatgtactctaatgcctcccttttcttcccccagccctgcctgatgtggctctgggaattcctgcagagaagagcaggggtggccaggagatagtgagcagctcccaggaggcatggagggatccagaacctggactgaagaaccacctagaaataactcagcagaattctgaaaatgaggtcacgctgggtaagaatgcctttttttttttttcatagtcaaagttagctatggagtttctgtagtattcactactccagacctttttcaagttgaattttttttctttttccctatgtctgttcttacgtattttttttaaacttttatttcagtagtgtttggggaacaagtagtgtttggttgcatggaaaagttcttcagtggtgatttctgagattttggtgcacccatcacccaagggtagtcttttttatccatcaagtctgtacccaatgtgtagtctttgtttttttctttttttttttttttgagactgagtctcattctatcacccaggctggagtggagtggtatgatcttgactcactgcaacatctgcctcccgggttcaagtgattctcctgcctcagcctcctgagtcgctgggattactgagattgtgccactgcactccagcctgggcgacagagtgagactccgtctc

SEQ ID NO: 2049 - DNA, 1729 bp, Homo sapiens
gccgaatagccgtgtttgggacctgggctcgggcttcttgcgtccccgctaagaacatgtcacggggccgaatcgtccgtattctctcagcttcaagctcctctacttttcaaccaggtcactagcccttgactcctcttatcaaacttccggaactgccaccccaccagtgactccacaggcaccagggcatgcaacagggctgggacaggaaggctctcttcttcacctcaagcctgctgggctaacacttgcgatttttactagagttaactttgtaatgtatgtctctgactctagaatttcaagagaagttccacttagtgactcctaagtggaagttctaagatggcttcccagtgaggtgatgaagaggtttgagctttagagtgcagttgcaaagctcttctctgacctgaacaatggctgtagctgtggaccaacaaatccagactccttcagtacaagatctccaaatagttaaactggaagaagattcccactgggagcaggaaatttcccttcaagggaattaccctggaccagagacatcctgccagagcttttggcatttccgttaccaagaagcatcacgaccccgagaggccctcctccagctccagaagctctgttgtcagtggctaaggccagagaagtgtacaaaagagcagatcctggagttgctggtcctagaacagttcccgactgtccttctccaggagatccagatctgggtcagacagcagcatccggagagtggagaggaggcagtggccctggtggaagacttgcagaaagaacctggaagacagaggctggagcctcgggcgaggccgtccggccgcacccctcctgctcagctgcggtcgccatggccaatgacagctgcgggcccggcgagccgagctcgagcgagcgagaccggcagtactgcgagctgtgcgggaagatggagaacctgctgcgctgcagccgcagctccttctgctgcaaggagcgccagcgccaggactggaagaagcacaagctcgtgtgccagggcagcgagggcgccctcggccacggagggggccctcaccaggactccggccccgcgccgcccgctgcagcgccgccgtccagggaccgggccctggaggccaggaaggcagcgaggcgccgggacagcgcctccggggacgcagccaaggcaaaggccaagtccgcggccgaccccgcggcggccgcgtccccgcctcgcgcgtccccgggccggacaaaagccatggctgcttgttatccggtcaatggaacgggttatgtacgtcatgttgataatccaaatggagacggaagacgtgtgaaatgtattacattacgttaaagaacgggatgccaagacaggaaccttgtctctgttgaagagcatcaagggaagattacatacgccttgaaaccgaaccctgcctgatgtggctctgggaattcctgcagagaagagcaggggtggccaggagatagtgagcagctcccaggaggcatggagggatccagaacctggactgaagaaccacctagaaataactcagcagaattctgaaaatgaggtcacgctggattttccaatccataggcccaaagtgaactcccacgtggagtaggatgaaaacccacagcatctagatcttcaaattctggagaaaaagagagtgtgaaagactgctcagtggctggggtgagagtcaagtct

SEQ ID NO: 2050 - DNA, 1674 bp, Homo sapiens
gccgaatagccgtgtttgggacctgggctcgggcttcttgcgtccccgctaagaacatgtcacggggccgaatcgtccgtattctctcagcttcaagctcctctacttttcaaccaggtcactagcccttgactcctcttatcaaacttccggaactgccaccccaccagtgactccacaggcaccagggcatgcaacagggctgggacaggaaggctctcttcttcacctcaagcctgctgggctaacacttgcgatttttactagagttaactttgtaatgtatgtctctgactctagaatttcaagagaagttccacttagtgactcctaagtggaagttctaagatggcttcccagtgaggtgatgaagaggtttgagctttagagtgcagttgcaaagctcttctctgacctgaacaatggctgtagctgtggaccaacaaatccagactccttcagtacaagatctccaaatagttaaactggaagaagattcccactgggagcaggaaatttcccttcaagggaattaccctggaccagagacatcctgccagagcttttggcatttccgttaccaagaagcatcacgaccccgagaggccctcctccagctccagaagctctgttgtcagtggctaaggccagagaagtgtacaaaagagcagatcctggagttgctggtcctagaacagttcccgactgtccttctccaggagatccagatctgggtcagacagcagcatccggagagtggagaggaggcagtggccctggtggaagacttgcagaaagaacctggaagacagaggctggagcctcgggcgaggccgtccggccgcacccctcctgctcagctgcggtcgccatggccaatgacagctgcgggcccggcgagccgagctcgagcgagcgagaccggcagtactgcgagctgtgcgggaagatggagaacctgctgcgctgcagccgcagctccttctgctgcaaggagcgccagcgccaggactggaagaagcacaagctcgtgtgccagggcagcgagggcgccctcggccacggagggggccctcaccaggactccggccccgcgccgcccgctgcagcgccgccgtccagggaccgggccctggaggccaggaaggcagcgaggcgccgggacagcgcctccggggacgcagccaaggcaaaggccaagtccgcggccgaccccgcggcggccgcgtccccgcctcgcgcgtccccgggccggacaaaagccatggctgcttgttatccggtcaatggaacgggttatgtacgtcatgttgataatccaaatggagacggaagacgtgtgaaatgtattacattacgttaaagaacgggatgccaagccctgcctgatgtggctctgggaattcctgcagagaagagcaggggtggccaggagatagtgagcagctcccaggaggcatggagggatccagaacctggactgaagaaccacctagaaataactcagcagaattctgaaaatgaggtcacgctgggacttccagttccccagccagatggggtcacaatgctgcagaaaagtgaagagctttggaatgaagatctcccggacttcaaggagattcagaaaacgtccagtgcaggtgggaaatgaatgggagctagcattccacc

SEQ ID NO: 2051 - DNA, 1668 bp, Homo sapiens
gccgaatagccgtgtttgggacctgggctcgggcttcttgcgtccccgctaagaacatgtcacggggccgaatcgtccgtattctctcagcttcaagctcctctacttttcaaccaggtcactagcccttgactcctcttatcaaacttccggaactgccaccccaccagtgactccacaggcaccagggcatgcaacagggctgggacaggaaggctctcttcttcacctcaagcctgctgggctaacacttgcgatttttactagagttaactttgtaatgtatgtctctgactctagaatttcaagagaagttccacttagtgactcctaagtggaagttctaagatggcttcccagtgaggtgatgaagaggtttgagctttagagtgcagttgcaaagctcttctctgacctgaacaatggctgtagctgtggaccaacaaatccagactccttcagtacaagatctccaaatagttaaactggaagaagattcccactgggagcaggaaatttcccttcaagggaattaccctggaccagagacatcctgccagagcttttggcatttccgttaccaagaagcatcacgaccccgagaggccctcctccagctccagaagctctgttgtcagtggctaaggccagagaagtgtacaaaagagcagatcctggagttgctggtcctagaacagttcccgactgtccttctccaggagatccagatctgggtcagacagcagcatccggagagtggagaggaggcagtggccctggtggaagacttgcagaaagaacctggaagacagaggctggagcctcgggcgaggccgtccggccgcacccctcctgctcagctgcggtcgccatggccaatgacagctgcgggcccggcgagccgagctcgagcgagcgagaccggcagtactgcgagctgtgcgggaagatggagaacctgctgcgctgcagccgcagctccttctgctgcaaggagcgccagcgccaggactggaagaagcacaagctcgtgtgccagggcagcgagggcgccctcggccacggagggggccctcaccaggactccggccccgcgccgcccgctgcagcgccgccgtccagggaccgggccctggaggccaggaaggcagcgaggcgccgggacagcgcctccggggacgcagccaaggcaaaggccaagtccgcggccgaccccgcggcggccgcgtccccgcctcgcgcgtccccgggccggacaaaagccatggctgcttgttatccggtcaatggaacgggttatgtacgtcatgttgataatccaaatggagacggaagacgtgtgaaatgtattacattacgttaaagaacgggatgccaagccctgcctgatgtggctctgggaattcctgcagagaagagcaggggtggccaggagatagtgagcagctcccaggaggcatggagggatccagaacctggactgaagaaccacctagaaataactcagcagaattctgaaaatgaggtcacgctggattttccaatccataggcccaaagtgaactcccacgtggagtaggatgaaaacccacagcatctagatcttcaaattctggagaaaaagagagtgtgaaagactgctcagtggctggggtgagagtcaagtct

SEQ ID NO: 2052 - DNA, 1711 bp, Homo sapiens
gccgaatagccgtgtttgggacctgggctcgggcttcttgcgtccccgctaagaacatgtcacggggccgaatcgtccgtattctctcagcttcaagctcctctacttttcaaccaggtcactagcccttgactcctcttatcaaacttccggaactgccaccccaccagtgactccacaggcaccagggcatgcaacagggctgggacaggaaggctctcttcttcacctcaagcctgctgggctaacacttgcgatttttactagagttaactttgtaatgtatgtctctgactctagaatttcaagagaagttccacttagtgactcctaagtggaagttctaagatggcttcccagtgaggtgatgaagaggtttgagctttagagtgcagttgcaaagctcttctctgacctgaacaatggctgtagctgtggaccaacaaatccagactccttcagtacaagatctccaaatagttaaactggaagaagattcccactgggagcaggaaatttcccttcaagggaattaccctggaccagagacatcctgccagagcttttggcatttccgttaccaagaagcatcacgaccccgagaggccctcctccagctccagaagctctgttgtcagtggctaaggccagagaagtgtacaaaagagcagatcctggagttgctggtcctagaacagttcccgactgtccttctccaggagatccagatctgggtcagacagcagcatccggagagtggagaggaggcagtggccctggtggaagacttgcagaaagaacctggaagacagaggctggagcctcgggcgaggccgtccggccgcacccctcctgctcagctgcggtcgccatggccaatgacagctgcgggcccggcgagccgagctcgagcgagcgagaccggcagtactgcgagctgtgcgggaagatggagaacctgctgcgctgcagccgcagctccttctgctgcaaggagcgccagcgccaggactggaagaagcacaagctcgtgtgccagggcagcgagggcgccctcggccacggagggggccctcaccaggactccggccccgcgccgcccgctgcagcgccgccgtccagggaccgggccctggaggccaggaaggcagcgaggcgccgggacagcgcctccggggacgcagccaaggcaaaggccaagtccgcggccgaccccgcggcggccgcgtccccgcctcgcgcgtccccgggccggacaaaagccatggctgcttgttatccggtcaatggaacgggttatgtacgtcatgttgataatccaaatggagacggaagacgtgtgaaatgtattacattacgttaaagaacgggatgccaagccctgcctgatgtggctctgggaattcctgcagagaagagcaggggtggccaggagatagtgagcagctcccagggagctagtgacacctggtgattcggctgtgtatatctcctaggaggcatggagggatccagaacctggactgaagaaccacctagaaataactcagcagaattctgaaaatgaggtcacgctggattttccaatccataggcccaaagtgaactcccacgtggagtaggatgaaaacccacagcatctagatcttcaaattctggagaaaaagagagtgtgaaagactgctcagtggctggggtgagagtcaagtct

SEQ ID NO: 2053 - DNA, 2244 bp, Homo sapiens
gccgaatagccgtgtttgggacctgggctcgggcttcttgcgtccccgctaagaacatgtcacggggccgaatcgtccgtattctctcagcttcaagctcctctacttttcaaccaggtcactagcccttgactcctcttatcaaacttccggaactgccaccccaccagtgactccacaggcaccagggcatgcaacagggctgggacaggaaggctctcttcttcacctcaagcctgctgggctaacacttgcgatttttactagagttaactttgtaatgtatgtctctgactctagaatttcaagagaagttccacttagtgactcctaagtggaagttctaagatggcttcccagtgaggtgatgaagaggtttgagctttagagtgcagttgcaaagctcttctctgacctgaacaatggctgtagctgtggaccaacaaatccagactccttcagtacaagatctccaaatagttaaactggaagaagattcccactgggagcaggaaatttcccttcaagggaattaccctggaccagagacatcctgccagagcttttggcatttccgttaccaagaagcatcacgaccccgagaggccctcctccagctccagaagctctgttgtcagtggctaaggccagagaagtgtacaaaagagcagatcctggagttgctggtcctagaacagttcccgactgtccttctccaggagatccagatctgggtcagacagcagcatccggagagtggagaggaggcagtggccctggtggaagacttgcagaaagaacctggaagacagaggctggagccctgcctgatgtggctctgggaattcctgcagagaagagcaggggtggccaggagatagtgagcagctcccaggaggcatggagggatccagaacctggactgaagaaccacctagaaataactcagcagaattctgaaaatgaggtcacgctggattttccaatccataggcccaaagtgaactcccacgtggagtaggatgaaaacccacagcatctagatcttcaaattctggagaaaaagagagtgtgaaagactgctcagtggctggggtgagagtcaagtctggccaggtgctaatctggagaaaagccaagacctggagcgagctggagtggcaggccctggaggatgagaaggtggcaggagtgcactggggatacaaagaaaccaagatttttctgggaattctcagaggcctggatccacgaaaaactccgcacctgccatcgaaaccaccaggtgtaccggattatggctgagcagctgtgagaacatggcttcctgtggaccctggagcaatgttgctatcggttcaaaaacctcctgaccgactactgcaaagccaggagcacctacacaccaggcaccagtgtcttctatgatgagatggatgccctgttgagtcttggggcactttctaacacctttgatgccttagaggtggtaggaggccttctttgggattgagaggattccaaagggaaccagggcatagcactagaagatgtggcgggatggtaatgaaatagtggaggagtctcaagaggaatcctggaggcttggtccccaggccttgaggtggaatcccagtggcaactctcccccacaatggacctcagagcagtgggagcgacgcagtcctgtgggaagcattcaggctcagaatcaggagatgtgattattgtcctggctctgttatgactaatttgggtctgggatggcctcatcgggggaaaaattggtgacaactttaagaaatactgtttatatcccgtcctcaaatattgcttgactcaaccctctactgaaccagtagtccagggtggctcacaaagaccactttgaggctcttgctctgctctttagccaaggagtctcccttcctgccttcagtaacaacattacaggaagagaggagagaaaggtaggagttaaagatccagtcatttgtttccatctaaagtgccctataagccgggcatcgtggcgcaagcctgtagtcccagctactcgggaggctggggcaggagaatcacttgagcccaggagttggaggccgcagtgagctgtgatcatgccactgcattccagcctgggcgacagagtgagacccagactcagctgaaaaataataatattattaaaagaatttaaaataaagtgttccatagatgtgaaaaaaaaaaaaaaaaaaaaaa

SEQ ID NO: 2054 - DNA, 2490 bp, Homo sapiens
ggcgcagcggctccctataagcagaggagctgtccgtgtgctgaaacggcccgagaagctcgcccggagaacggggaggaatatgctgtggagctcctctgccatataaacaaaaagaggaaatctttcaaacatggctgaagcaaagacccactggcttggagcagccctgtctcttatccctttaattttcctcatctctggggctgaagcagcttcatttcagagaaaccagctgcttcagaaagaaccagacctcaggttggaaaatgtccaaaagtttcccagtcctgaaatgatcagggctttggagtacatagaaaacctccgacaacaagctcataaggaagaaagcagcccagattataatccctaccaaggtgtctctgtcccccttcagcaaaaagaaaatggcgatgaaagccacttgcccgagagggattcactgagtgaagaagactggatgagaataatactcgaagctttgagacaggctgaaaatgagcctcagtctgcaccaaaagaaaataagccctatgccttgaattcagaaaagaactttccaatggacatgagtgatgattatgagacacagcagtggccagaaagaaagcttaagcacatgcaattccctcctatgtatgaagagaattccagggataacccctttaaacgcacaaatgaaatagtggaggaacaatatactcctcaaagccttgctacattggaatctgtcttccaagagctggggaaactgacaggaccaaacaaccagaaacgtgagaggatggatgaggagcaaaaactttatacggatgatgaagatgatatctacaaggctaataacattgcctatgaagatgtggtcgggggagaagactggaacccagtagaggagaaaatagagagtcaaacccaggaagaggtgagagacagcaaagagaatatagaaaaaaatgaacaaatcaacgatgagatgaaacgctcagggcagcttggcatccaggaagaagatcttcggaaagagagtaaagaccaactctcagatgatgtctccaaagtaattgcctatttgaaaaggttagtaaatgctgcaggaagtgggaggttacagaatgggcaaaatggggaaagggccaccaggctttttgagaaacctcttgattctcagtctatttatcagctgattgaaatctcaaggaatttacagatacccccagaagacttaattgagatgctcaaaactggggagaagccgaatggatcagtggaaccggagcgggagcttgaccttcctgttgacctagatgacatctcagaggctgacttagaccatccagacctgttccaaaataggatgctctccaagagtggctaccctaaaacacctggtcgtgctgggactgaggccctaccagacgggctcagtgttgaggatattttaaatcttttagggatggagagtgcagcaaatcagaaaacgtcgtattttcccaatccatataaccaggagaaagttctgccaaggctcccttatggtgctggaagatctagatcgaaccagcttcccaaagctgcctggattccacatgttgaaaacagacagatggcatatgaaaacctgaacgacaaggatcaagaattaggtgagtacttggccaggatgctagttaaataccctgagatcattaattcaaaccaagtgaagcgagttcctggtcaaggctcatctgaagatgacctgcaggaagaggaacaaattgagcaggccatcaaagagcatttgaatcaaggcagctctcaggagactgacaagctggccccggtgagcaaaaggttccctgtggggcccccgaagaatgatgataccccaaataggcagtactgggatgaagatctgttaatgaaagtgctggaatacctcaaccaagaaaaggcagaaaagggaagggagcatattgctaagagagcaatggaaaatatgtaagctgctttcattaattaccctactttcattcctcccaccccaagcaaatcccaacatttctcttcagtgtgttgacttctatcctgttaacactgtaatatctttaaatgatgtacaggcagatgaaaccaggtcactggggagtctgcttcatttcctctgagctgttatcttgtgtatggatatgtgtaaatgttatgactccttgataaaaaatttattatgtccattattcaagaaagatatctatgactgtgtttaatagtatatctaatggctgtggcattgttgatgctcacatatgataaaaaagtgtcctataattctattgaaagtttttaatatttattgaattattttgttactgtctgtagtgttttgtggagtactggaccaaaaaaataaagcattataaatatatagttttatttataaggccttttctattgtgtgttttactgttgattaataaatgttatttctggacaaaaaaaaaaaaaaaa

SEQ ID NO: 2055 - DNA, 517 bp, Homo sapiens
cctccacagcaacttccttgatccctgccacgcacgactgaacacagacagcagccgcctcgccatgaagctgctgatggtcctcatgctggcggccctcctcctgcactgctatgcagattctggctgcaaactcctggaggacatggttgaaaagaccatcaattccgacatatctatacctgaatacaaagagcttcttcaagagttcatagacagtgatgccgctgcagaggctatggggaaattcaagcagtgtttcctcaaccagtcacatagaactctgaaaaactttggactgatgatgcatacagtgtacgacagcatttggtgtaatatgaagagtaattaactttacccaaggcgtttggctcagagggctacagactatggccagaactcatctgttgattgctagaaaccacttttctttcttgtgttgtctttttatgtggaaactgctagacaactgttgaaacctcaaattcatttccatttcaataactaactgcaaatc

SEQ ID NO: 2056 - DNA, 1764 bp, Homo sapiens
ctgctatagtacgcgggtggctggacctacatgcttcctgctgtggctgtctcggaacccgtggtcctccgcttcatgattttctgccgtctcttggcaaaaatggcaaataatgatgctgttctgaagagactggagcagaagggtgcagaggcagatcaaatcattgaatatcttaagcagcaagtttctctacttaaggagaaagcaattttgcaggcaactttgagggaagagaagaaacttcgagttgaaaatgctaaactgaagaaagaaattgaagaactgaaacaagagctaattcaggcagaaattcaaaatggagtgaagcaaataccatttccatctggtactccactgcacgctaattctatggtttctgaaaatgtgatacagtctacagcagtaacaaccgtatcttctggtaccaaagaacagataaaaggaggaacaggagacgaaaagaaagcgaaagagaaaattgaaaagaaaggagagaagaaggagaaaaaacagcaatcaatagctggaagtgccgactctaagccaatagatgtttcccgtctggatcttcgaattggttgcatcataactgctagaaaacaccctgatgcagattctttgtatgtggaagaagtagatgtcggagaaatagccccaaggacagttgtcagtggcctggtgaatcatgttcctcttgaacagatgcaaaatcggatggtgattttactttgtaacctgaaacctgcaaagatgaggggagtattatctcaagcaatggtcatgtgtgctagttcaccagagaaaattgaaatcttggctcctccaaatgggtctgttcctggagacagaattacttttgatgctttcccaggagagcctgacaaggagctgaatcctaagaagaagatttgggagcagatccagcctgatcttcacactaatgatgagtgtgtggctacatacaaaggagttccctttgaggtgaaagggaagggagtatgtagggctcaaaccatgagcaacagtggaatcaaataaaatgcttccactaccaaaagacattagagaaaaccttaaaagtaataaagagaaatatatttgtcacttatacctaaaatatgagtggctcatttttgcattactctcttctagacttgactagtcatttacttggtatatattgttttcattgattggggaaacactagatttttacctcggtttttgatcatttataatggagagaggaagttgcctatgttttgtaataatttattttttagcaggaatattgattagcagcttttttttctttatacacatagataactaactagattaatgtttagtttcttatttgtaggcacaggatgcatgaaatttcaagctctgggattttttgtatattgtgtatctgtatcaaaaatatcctctccttttcaaaaatgacaggttggaaaatgtttgtcagacttattaactggtcatattataataatactgataatgaccaactgctcattctgaaagccaaacataaaagctaggagaagtggcatctgaacatttttgctttgctgccagagtaaccctgactaataatacaataacagcaatttttttaaaaaactgagatttcctactggcttgaagtttttctatttagcaaaataattagtaataagttttgactaggtctaaagaatgaacacattgtaaacagttgccacagtagtttctaataaattgatcataaaagca

SEQ ID NO: 2057 - DNA, 2155 bp, Homo sapiens
ggctgaaggcgggggcggtgccatgacgcgcctcgggggcggtcctcgggcgcgcaccgctctcttacactcgggcctcagaagtccgtgccagtgaccggaggcggcggcggcgagcggttccttgtgggctagaagaatcctgcaaaaatgtctctctatccatctctcgaagacttgaaggctcaaactgctttttctgcaaaccctgccaatccagcaattttgtcagaagcttctgctcctatccctcacgatggaaatctctatcccagactgtatccagagctctctcaatacatggggctgagtttaaatgaagaagaaatacgtgcaaatgtggccgtggtttctggtgcaccacttcaggggcagttggtagcaagaccttccagtataaactatatggtggctcctgtaactggtaatgatgttggaattcgtagagcagaaattaagcaagggattcgtgaagtcattttgtgtaaggatcaagatggaaaaattggactcaggcttaaatcaatagataatggtatatttgttcagctagtccaggctaattctccagcctcattggttggtctgagatttggggaccaagtacttcagatcaatggtgaaaactgtgcaggatggagctctgataaagcgcacaaggtgctcaaacaggcttttggagagaagattaccatgaccattcgtgacaggccctttgaacggacgattaccatgcataaggatagcactggacatgttggttttatctttaaaaatggaaaaataacatccatagtgaaagatagctctgcagccagaaatggtcttctcacggaacataacatctgtgaaatcaatggacagaatgtcattggattgaaggactctcaaattgcagacatactgtcaacatctgggactgtagttactattacaatcatgcctgcttttatctttgaacatattattaagcggatggcaccaagcattatgaaaagcctaatggaccacaccattcctgaggtttaaaattcacggcaccatggaaatgtagctgaacgtctccagtttccttctttggcaacttctgtattatgcacgtgaagccttcccggagccagcgagcatatgctgcatgaggacctttctatcttacattatggctgggaatcttactctttcatctgataccttgttcagatttcaaaatagttgtagccttatcctggttttacagatgtgaaactttcaagagatttactgactttcctagaatagtttctctactggaaacctgatgcttttataagccattgtgattaggatgactgttacaggcttagctttgtgtgaaaaccagtcacctttctcctaggtaatgagtagtgctgttcatattactttagttctatagcatacttgcatctttaacatgctatcatagtacatttagaatgattgcctttgattttttttttaaattctgtgtgtgtgtgtgtaaaatgccaattaagaacactggtttcattccatgtaagcattaaacagtgtatgtaggtttcaagagattgtgatgattcttaaattttaactaccttcacttaatatgcttgaactgtcgccttaactatgttaagcatctagactaaaagccaaaatataattattgctgcctttctaaaaacccaaaatgtagttctctattaacctgaaatgtacactagcccagaacagtttaatggtacttactgagctatagcatagctgcttagttgtttttgagattttttagtcaacacataatggaaacttctttcttctaaaagttgccagtgccacttttaagaagtgaatcactatatgtgatgtaaaagttattacactaaacaggataaacttttgactccccttttgttcatttgtggattaagtggtataatacttaattttggcatttgactcttaagattatgtaacctagctactttgggatggtcttagaatatttttctgataacttgttccttttcctgactcctccttgcaaacaaaatgatagttgacactttatcctgatttttttcttctttttggtttatgtctattctaattaaatatgtataaataaagttacattttagtctgtctaaaaaaa

SEQ ID NO: 2058 - DNA, 1475 bp, Homo sapiens
cttcccagatcaggaagccagctgagagacagggctacgtttcagggagggaaacagattcagcagcggcagcagctggagaaggtcgtggagcagcaccttgcctgcagggtgttctgagaatcagccatgtcatccctgtacccatctctagaggacctaaaagtggaccaagccattcaggcccaggtcagagcctcacccaagatgccagccctgccagtccaggcaacagccatttccccaccaccagttttgtacccaaacttggcagaactggaaaattatatgggtctttccctctccagccaagaagtccaggagagcctgcttcagattccagagggtgacagtacagcggtctcgggccccgggcccggccagatggtggcaccggtaaccgggtacagcctgggcgtgcggcgagctgagatcaagcccggggtgcgcgagatccacctgtgcaaggacgagcgcggcaagaccgggctgaggctgcggaaggtcgaccaggggctctttgtgcagttggtccaggccaacacccctgcatcccttgtggggctgcgctttggggaccagctcctgcagattgacgggcgtgactgtgctgggtggagctcgcacaaagcccatcaggtggtgaagaaggcatcaggcgataagattgtcgtggtggttcgggacaggccgttccagcggactgtcaccatgcacaaggacagcatgggccacgtcggcttcgtgatcaagaaggggaagattgtctctctggtcaaagggagttctgcggcccgcaacgggctcctcaccaaccactacgtgtgtgaggtggacgggcagaatgttatcgggctgaaggacaaaaagatcatggagattctggccacggctgggaacgttgtcaccctgaccatcatccccagtgtgatctacgagcacatggtcaaaaagttgcctccagtcctgctccaccacaccatggaccactccatcccagatgcctgaagccactgcagggcagggcaggcagggggggcttcccgccctcctgcagcaaagggcaaccaccctcggatgatgggttgcagccggcctgctgcttaaggtgggggctgccatgaggggggcgtgtccaggagggtgaccatgggatggcttatacacacaggcctccttggagcctcagactccaagctaggctgaggctcaggcagggcccacaggcagccgattctcttgtgctgatttaaatgctggacacggaggcaggctgtttaaacgctgcttaaagtcgcaactgggcccctttcaagaaattttgctctaccaggaaaacagttacacattttaagagaacagagctacgttctttgtgagagctttttccttgccttgacttgctctttgtcacagactgcataagttgtcagccttgactatcttttgaataaagatttgattttaaacaaaaa

SEQ ID NO: 2059 - DNA, 2093 bp, Homo sapiens
ttagcggtgctcgggtccggtaacaacatggcggcgtccgtgaggggctcctttgggcaggggtagtgtttggtgtccctgtcttgcgtgatattgacaaactgaagctttcctgcaccactggacttaaggaagagtgtactcgtaggcggacagctttagtggccggccggccgctctcatcccccgtaaggagcagagtcctttgtactgaccaagatgagcaacatctacatccaggagcctcccacgaatgggaaggttttattgaaaactacagctggagatattgacatagagttgtggtccaaagaagctcctaaagcttgcagaaattttatccaactttgtttggaagcttattatgacaataccatttttcatagagttgtgcctggtttcatagtccaaggcggagatcctactggcacagggagtggtggagagtctatctatggagcgccattcaaagatgaatttcattcacggttgcgttttaatcggagaggactggttgccatggcaaatgctggttctcatgataatggcagccagtttttcttcacactgggtcgagcagatgaacttaacaataagcataccatctttggaaaggttacaggggatacagtatataacatgttgcgactgtcagaagtagacattgatgatgacgaaagaccacataatccacacaaaataaaaagctgtgaggttttgtttaatccttttgatgacatcattccaagggaaattaaaaggctgaaaaaagagaaaccagaggaggaagtaaagaaattgaaacccaaaggcacaaaaaattttagtttactttcatttggagaggaagctgaggaagaagaggaggaagtaaatcgagttagtcagagcatgaagggcaaaagcaaaagtagtcatgacttgcttaaggatgatccacatctcagttctgttccagttgtagaaagtgaaaaaggtgatgcaccagatttagttgatgatggagaagatgaaagtgcagagcatgatgaatatattgatggtgatgaaaagaacctgatgagagaaagaattgccaaaaaattaaaaaaggacacaagtgcgaatgttaaatcagctggagaaggagaagtggagaagaaatcagtcagccgcagtgaagagctcagaaaagaagcaagacaattaaaacgggaactcttagcagcaaaacaaaaaaaagtagaaaatgcagcaaaacaagcagaaaaaagaagtgaagaggaagaagcccctccagatggtgctgttgccgaatacagaagagaaaagcaaaagtatgaagctttgaggaagcaacagtcaaagaagggaacttcccgggaagatcagacccttgcactgctgaaccagtttaaatctaaactcactcaagcaattgctgaaacgcctgaaaatgacattcctgaaacagaagtagaagatgatgaaggatggatgtcacatgtacttcagtttgaggataaaagcagaaaagtgaaagatgcaagcatgcaagactcagatacatttgaaatctatgatcctcggaatccagtgaataaaagaaggagggaagaaagcaaaaagctgatgagagagaaaaaagaaagaagataaaatgagaataatgataaccagaacttgctggaaatgtgcctacaatggccttgtaacagccattgttcccaacagcatcacttaggggtgtgaaaagaagtatttttgaacctgttgtctggttttgaaaaacaattatcttgttttgcaaattgtggaatgatgtaagcaaatgcttttggttactggtacatgtgttttttcctagctgaccttttatattgctaaatctgaaataaaataactttccttccacattacatgttaaccattgcagactgcaagcctgtttgtgtccttttaccctaaaatatatgaaggcttccttttcaagatttttttataagaagttcctacagaaagaatatttgtgggaaacctccctttcactaacttcagaatataataaaatattataaataaaatatagaatataaatatgaaaaaaaaaaaaa

SEQ ID NO: 2060 - DNA, 1075 bp, Homo sapiens
gttttcttcgaagatttggggctccgcgatacagttaggatggctgtagtacctctgctgttgttggggggtttgtggagcgctgtgggagcgtccagcctgggtgtcgttacttgcggctccgtggtgaagctactcaatacgcgccacaacgtccgactgcactcacacgacgtgcgctatgggtcaggtagtgggcagcagtcagtgacaggtgtaacctctgtggatgacagcaacagttactggaggatacgggggaagagtgccacagtgtgtgagaggggaacccccatcaagtgtggccagcccatccggctgacacatgtcaacactggccgaaacctccatagtcaccacttcacttcacctctttctggaaaccaggaagtgagtgcttttggtgaggaaggtgaaggtgattatctggatgactggacagtgctctgtaatggaccctactgggtgagagatggtgaggtgcggttcaaacactcttccactgaggtactgctgtctgtcacaggagaacaatatggtcgacctatcagtgggcaaaaagaggtgcatggcatggcccagccaagtcagaacaactactggaaagccatggaaggcatcttcatgaagcccagtgagttgttgaaggcagaagcccaccatgcagagctgtgaatctagaggctctgagccactgttaacgcacaatgttcacagacatctgttgctgcctcaccttgggatccctgccacaagttccttgggcagtggccatgtcaccattgagatgaagatatacaacagaaaatagtggctgtgtttggaagcttcagccctgcacatttgaactagtcactctcccagacttgcgtgggtcagttctttctgagtagaggacttgctggtaaaggggcagatgctttttattagtactgataaaacaaactgagggaaacatccctcttagctgggaaacttttactcttcaggagcttggcatcatggactgttaatgtatgtgattttccccctattttctctctccaaaatgataaaaacaataattttattatga

SEQ ID NO: 2061 - DNA, 1313 bp, Homo sapiens
ccaggaacgagatggcggttctctggaggctgagtgccgtttgcggtgccctaggaggccgagctctgttgcttcgaactccagtggtcagacctgctcatatctcagcatttcttcaggaccgacctatcccagaatggtgtggagtgcagcacatacacttgtcaccgagccaccattctggctccaaggctgcatctctccactggactagcgagagggttgtcagtgttttgctcctgggtctgcttccggctgcttatttgaatccttgctctgcgatggactattccctggctgcagccctcactcttcatggtcactggggccttggacaagttgttactgactatgttcatggggatgccttgcagaaagctgccaaggcagggcttttggcactttcagctttaacctttgctgggctttgctatttcaactatcacgatgtgggcatctgcaaagctgttgccatgctgtggaagctctgacctttttgacttcatactttgaagaattgatgtatgcctctttgcctctgctttgtcatgccattaagctcacaataaggaagaaataacagataagtccattggtggacagccttcttctcttaatcacaagattattttcagaatttaatctttgaggaaaaggtttgagaggaattatatctaagttgtgagactgagttctatattctggtgagttaatggggttgcctcccagcttcttataagactcacagtataactaaacatgatatatcagcttttgcctttcaatttatcaatctcttaaagagaatccaactttattacgattagtatatgatcaaacttccatatttgccttgggaataatggacaaagggaaatactcttaattcatgaataaaaactttgcagaaaattagacagtgtttaattttcgaaaacttccctctctagacagtagataccacctactgatggttacatatactagggaaattttaaaattaggaaatgctgatagctcatattataaatttctaaatcctaggaagaaacgcttggagtgcttctgaatatacagaagttccatttaagggcaagtttccccgtagatgtatcaaaatactaccaactgtaaattgagatttaattcccaaatgtattctacttgttctaaaacaatctgtccacaaatataaaactataagtaataaattgttattttcgcacaatgggaatctctaatgtgaaaatgtattctatgaaaataattttttaaataaaatgttatataataaaagtgtcttctatgctttt

SEQ ID NO: 2062 - DNA, 6628 bp, Homo sapiens
tcaccatccccaaccccaccggcagcgacgccggctactacgagtgcgaggctgtcctgcgcagcagcagcgtcccctctgttgtccggggcgcctacctctcagtgctggaaccgcctcagtttgtcaaggagccagaaagacacatcactgcggagatggagaaggtggtggacatcccctgtcaggccaaaggtgtgccgccgccctccatcacctggtacaaggacgcagccgtggtggaggtggagaagttgacccgcttccggcagcgcaacgacgggggcctgcagatcagcggcctggtgcccgatgataccggcatgttccagtgcttcgcccgcaatgcagccggcgaggtgcaaacttccacctacctggctgtcaccagcatcgcccctaacatcaccagaggccccctggacagcacggtgatcgatggcatgtcagtggtgctagcatgtgagacctcgggggcgccccgaccagctatcacttggcagaaaggggagcgcatcttggccagtggctctgtgcagctgcctcgcttcacacccctggagtcgggcagcctcctcatcagccccacacacatctccgatgcggggacctacacctgcctggccaccaactctcggggggtcgatgaggcctcagcagacctagtcgtttgggctcggacccgcatcaccaagcccccccaggatcagagtgtcatcaagggcacccaggcctccatggtgtgcggagtgacccacgacccccgagtaaccatcaggtacatctgggagaaggacggggccaccctgggcacggagagccatcctcgtatccgcctggacagaaacggctccctgcacatctcacagacgtggtcgggagacatcggcacgtacacctgccgggtgatctcagcaggaggcaacgactctcgcagtgcccacctgcgagtcaggcaactgccccacgcgcccgagcacccagtggccactctcagcaccgtggaaaggcgagccatcaacctgacgtggaccaagccctttgatggcaacagccccctgatccgctacattctggagatgtcggagaacaatgccccctggactgtactcctggccagtgtggaccccaaagctacctcagtgacagtcaagggcctggttcctgcacgctcctaccagttccgtctttgtgccgtcaacgacgtggggaaaggacagttcagcaaagacaccgagagggtctccctccccgaggagccccccacggcccctccacagaacgtcatcgccagcggtcgaaccaaccagtccatcatgatccagtggcagccgcctcctgagagccaccagaatggaattctcaagggttacatcatcaggtactgcctggccgggctgcccgtggggtaccagtttaagaacatcacggatgctgatgtgaacaacctgctgctggaggatctcatcatttggaccaactacgagatcgaggtggctgcttacaacagcgctgggctgggggtctacagcagtaaagtcaccgagtggacgctgcagggagttcccacagtccctccgggcaatgtgcacgcggaagccaccaattccacgaccatccgcttcacctggaacgcccccagcccccagttcatcaacggcatcaaccagggctacaagctgatcgcctgggagccggaacaggaagaggaggttaccatggtgaccgcccggcctaactttcaagacagcatccacgtgggcttcgtgtctggcctgaagaagttcaccgagtacttcacctcagtgctgtgtttcaccacccccggggacgggccacgcagcaccccgcagctggtgcgcacccatgaggatgtgcctgggcccgtgggacacctgagcttcagtgagatcctggacacatcgctgaaggtcagctggcaagagccgggagagaaaaatggcatcctcacagggtaccggatctcctgggaggagtacaatcgaaccaacacccgtgtgacccactacctgcccaacgtgaccctggagtaccgtgtcacgggcctcaccgcgctcaccacctacaccatcgaggtggccgccatgacctcaaagggccagggccaagtgtccgcctccaccatctcctctggggtgcccccagaactcccagggccccccaccaacctgggcatttccaacatcggcccccgctctgtgaccttgcagttcaggccaggctacgatgggaaaacctccatctcccgctggctggtggaagcccaggtaggcgtggttggggagggagaggagtggttgctgatccaccagctctccaatgagcccgatgcccgctccatggaggtgcccgacctcaaccccttcacctgctacagcttccgcatgcgccaggtgaacatcgtgggcaccagcccccccagtcagccttctagaaagatccagaccctgcaggcaccccctgacatggccccagccaatgtgtctctgcgcacagccagtgagaccagcctgtggctgcgctggatgcctctcccggagatggaatacaatgggaaccctgagtccgtgggctataagatcaagtacagccggtcagacgggcatggcaagacgctgagccacgtggtgcaggaccgtgtggagcgggactacaccatcgaggacctggaggagtggacagagtaccgcgtccaggtccaggccttcaacgccatcgggagcgggccctggagccagacggtggtgggcaggacccgggagtcagttccctcttccggccccaccaatgtgtctgcactggccaccacctccagcagcatgctggtgcgctggagcgaggtccccgaggctgatcgcaacgggctcgtgctgggctataaggtgatgtataaggagaaggactcggacacccagccccgattctggctggtggaaggcaactcgtctcgcagtgcccagctcaccggcttgggcaaatacgtgctctatgaagtccaggtgctggccttcacacgcatcggggacggcagccccagccaccctcccatcctggagcggacgctggatgatgtcccaggaccacccatgggcatcctgttcccagaggtgcggaccacgtctgtgcggctgatctggcagccccctgccgcccccaatggcatcattcttgcttaccagatcacacaccggctcaacaccaccacggccaacaccgccactgtggaggtgctggcacccagcgcccggcagtacacagccacgggcctcaagccagagtctgtctacctgttccgcatcacggcccagacccgcaagggctggggagaagctgccgaggccttggtggtgaccaccgagaagagagaccgtccgcagccccccagcaggccgatggtgcagcaggaggatgtgagagcacgcagcgtgctgctgtcctgggagccagggagcgacgggctctcccctgtgcgctactacaccatccagacccgcgagctgcccagcggcaggtgggcactgcactcggcctccgtgagccacaatgcctccagcttcattgtggacaggctgaagcccttcacgtcctacaagttccgagtgaaggcgaccaatgacattggcgacagcgagttcagcgaggagtcggagtcactgaccaccctgcaggctgcccccgatgaagcacccaccatcctctccgtgacgccccacaccaccacctccgtgctaatccgatggcagccgccagcagaggacaagatcaatggcatcctcctgggcttccggatccgataccgggagctgctctatgaaggactgaggggcttcacgcttcgaggcatcaacaacccaggggccacatgggctgagcttacctccatgtactccatgcggaacctgagccggcccagcctcacgcagtacgagctggacaacctgaacaagcacaggcggtacgagatacggatgagcgtgtacaacgctgtgggtgaggggccctccagccccccgcaggaggtctttgttggggaggcagtgcccacagcagcacctcgtaacgtggtcgtccacggcgccacggccacacagctggacgtgacttgggagccacctccgctggacagccagaatggagacatccaggggtacaagatttatttctgggaagcccagcgggggaacctcacagagcgagtgaagacgcttttcctggctgagaacagcgtgaagctcaagaacttgactggctacacggcctacatggtcagcgtggccgccttcaacgccgctggggatgggcctcggagcacccccacccaaggccagacccagcaagcagcccccagcgctcccagctcggtcaagttcagtgagctgaccacaacctcagtgaatgtgtcctgggaagccccgcagttccccaatggcatcctggagggctacaggctggtgtacgagccctgcagccccgtggatggagtcagcaagatcgtgaccgtggacgtgaaggggaacagccccctgtggctgaaggtgaaggacctggcggagggggtgacctacaggttccgcatcagagccaagaccttcacctacgggccggagatcgaagccaacgtcaccacgggccccggagaaggtgccccaggaccgcctggcgtgcccatcatcgtgcggtacagctctgccatcgccattcactggtccagcggagacccgggcaaagggcccatcacccgctacgtcatcgaggccagaccttcagacgagggactatgggacatcctcatcaaagacatccccaaggaggtgagctcctacacgttcagcatggacatcctgaagccgggcgtgagctatgacttccgggtcatcgcggtcaacgactatggtttcggcacccccagcagcccctcccagtctgtgccagcccagaaagccaaccccttctatgaggagtggtggttcttggtggtcattgccctggtcggcctcatcttcatcctgcttctggtcttcgtgctcatcatccggggccagagcaagaagtacgccaagaagacagactcggggaacagtgccaagtctggagccctaggccacagcgagatgatgagcttggatgaaagcagcttccctgccctggaactcaacaacaggcggctctccgtcaagaactctttctgccgaaagaacggcctgtacaccaggtctccccccaggcccagcccaggcagcctgcactactcggatgaggatgtcaccaaatacaacgacctcatccctgcagagagcagcagcctgacggagaagccctcagaaatctccgactctcagggaagtgacagcgagtacgaggtcgactcaaaccaccagaaggcccactcctttgtcaaccactacatcagtgaccccacatactacaactcgtggcggcgacagcagaagggcatctcgagggcacaggcctacagctacacggagagcgactcgggtgagccagaccacaccaccgtcaccaacagcaccagcacccagcagggcagcctctttcggcccaaggccagtcggactccaacgccccagaacccccctaaccccccaagtcagcagagcaccctctaccgtccccccagcagcctggccccaggctcccgggctcccatagcaggattttcatcatttgtttgacatcagaagaggaaaaagcagaaagagaaatggcaccaaactcctccttcacccctcctctcactgcctgccagaaaacaaaaacaccaagaaaccaagtcaacttttcacctcctgagtttatttttccagagattccagggccagcaaagccggcgttcagaaggagggagaaaaccgtgagaggatgtgtgtggccagcagctcttcagctttgagatggtggggttcactgctcccttgggaattacacggagctggggaagtggctgtgtcactgctatggacacggagtggggcgggcatctggagagagagagggagcggaggctaaggactggaggccgccaggcaggcgtggccgagggaagaaaaagcttctggatgtccagccagctgcccccttccagcccctccaggacccctggacccactgccgctgctctctgcaaaaagaatgggcatcccggaggccacgcctatcttctctctctgctcctccttccctccatgcaccatcactgtggctggcaggcatcggacagcctcatccagaccccctgccctgtcttggcaacctctactgcccatctcccctgctcaacttctccaccaagcatttggtttatttagaaaaaggaagaaaaacaaaaaacaaaaaactaaagggtgagaatttgcttagcgccttccttgttcctgcatattttttaaaatattgaatccaaggaagagagcccaagggtaggggagaaaccccccacaactgacccctgcctccctgtgctggaattgactttcctgagcatggacaaggaaaggtgaagtctggggagcagaggtgtaaataaggcgactggccttggcactgtgggatgattaggtttaacgcattgtgggcaagataagaatga

SEQ ID NO: 2063 - DNA, 1472 bp, Homo sapiens
gggacgcctctctcctccttattcggtttactatttattgttcggggtgttttttaattcctgtattgctcggcccggggagtttcgccccctgcccggctccgcggcgcggaggatggtgtggaaacggctgggcgcgctggtgatgttccctctacagatgatctatctggtggtgaaagcagccgtcggactggtgctgcccgccaagctgcgggacctgtcgcgggagaacgtcctcatcaccggcggcgggagaggcatcgggcgtcagctcgcccgcgagttcgcggagcgcggcgccagaaagattgttctctggggccggactgagaaatgcctgaaggagacgacggaggagatccggcagatgggcactgagtgccattacttcatctgtgatgtgggcaaccgggaggaggtgtaccagacggccaaggccgtccgggagaaggtgggtgacatcaccatcctggtgaacaatgccgccgtggtccatgggaagagcctaatggacagtgatgatgatgccctcctcaagtcccaacacatcaacaccctgggccagttctggaccaccaaggccttcctgccgcgtatgctggagctgcagaatggccacatcgtgtgcctcaactccgtgctggcactgtctgccatccccggtgccatcgactactgcacatccaaagcgtcagccttcgccttcatggagagcctgaccctggggctgctggactgtccgggagtcagcgccaccacagtgctgcccttccacaccagcaccgagatgttccagggcatgagagtcaggtttcccaacctctttcccccactgaagccggagacggtggcccggaggacagtggaagctgtgcagctcaaccaggccctcctcctcctcccatggacaatgcatgccctcgttatcttgaaaagcatacttccacaggctgcactcgaggagatccacaaattctcaggaacctacacctgcatgaacactttcaaagggcggacatagagacaggatgaagacatgcttgaggagccacggagtttgggggccacagcacctgggcacacacccgagcacctgtccattggcatgcttctgctgggtgagcaggacagctcctgtccccagcgaagaatccggctgcccctgggccagtcccaggacctttgcacaggactgatgggtataactgacccccacagggaggcaggaaaacagccagaagccaccttgacacttttgaacatttccagttctgtagagtttattgtcaattgcttctcaagtctaaccagcctcagcagtgtgcatagaccatttccaggagggtctgtccccagatgctctgcctcccgttccaaaacccactcatcctcagcttgcacaaactggttgaacggcaggaatgaaaaataaagagagatggcttttgtgaaaaaaaaaaaaaaaaaaa

SEQ ID NO: 2064 - DNA, 8522 bp, Homo sapiens
acttccggcgtatgaggcggtgacaatgggagcagcgcgggcggcgccgggaggcagctgacaagcgtttgcggcttcgcttcatggccgctctcccgcccctcctgggatctgtggggagctggggagcccgcagcggcccggagccggagctggcgagccgagcggagacctgtgcgccgcgcctctgaggcgcagcatgtgaagcggagacggcatccagtggggggcgagcctctcagccggccgggatggctaccacggccgagctcttcgaggagccttttgtggcagatgaatatattgaacgtcttgtatggagaaccccaggaggaggctctagaggtggacctgaagcttttgatcctaaaagattattagaagaatttgtaaatcatattcaggaactccagataatggatgaaaggattcagaggaaagtagagaaactagagcaacaatgtcagaaagaagccaaggaatttgccaagaaggtacaagagctgcagaaaagcaatcaggttgccttccaacatttccaagaactagatgagcacattagctatgtagcaactaaagtctgtcaccttggagaccagttagagggggtaaacacacccagacaacgggcagtggaggctcagaaattgatgaaatactttaatgagtttctagatggagaattgaaatctgatgtttttacaaattctgaaaagataaaggaagcagcagacatcattcagaagttgcacctaattgcccaagagttaccttttgatagattttcagaagttaaatccaaaattgcaagtaaataccatgatttagaatgccagctgattcaggagtttaccagtgctcaaagaagaggtgaaatctccagaatgagagaagtagcagcagttttacttcattttaagggttattcccattgtgttgatgtttatataaagcagtgccaggagggtgcttatttgagaaatgatatatttgaagacgctggaatactctgtcaaagagtgaacaaacaagttggagatatcttcagtaatccagaaacagtcctggctaaacttattcaaaatgtatttgaaatcaaactacagagttttgtgaaagagcagttagaagaatgtaggaagtccgatgcagagcaatatctcaaaaatctctatgatctgtatacaagaaccaccaatctttccagcaagctgatggagtttaatttaggtactgataaacagactttcttgtctaagcttatcaaatccattttcatttcctatttggagaactatattgaggtggagactggatatttgaaaagcagaagtgctatgatcctacagcgctattatgattcgaaaaaccatcaaaagagatccattggcacaggaggtattcaagatttgaaggaaagaattagacagcgtaccaacttaccacttgggccaagtatcgatactcatggggagacttttctatcccaagaagtggtggttaatcttttacaagaaaccaaacaagcctttgaaagatgtcataggctctctgatccttctgacttaccaaggaatgccttcagaatttttaccattcttgtggaatttttatgtattgagcatattgattatgctttggaaacaggacttgctggaattccctcttcagattctaggaatgcaaatctttattttttggacgttgtgcaacaggccaatactatttttcatctttttgacaaacagtttaatgatcaccttatgccactaataagctcttctcctaagttatctgaatgccttcagaagaaaaaagaaataattgaacaaatggagatgaaattggatactggcattgataggacattaaattgtatgattggacagatgaagcatattttggctgcagaacagaagaaaacagattttaagccagaagatgaaaacaatgttttgattcaatatactaatgcctgtgtaaaagtctgtgcttacgtaagaaaacaagtggagaagattaaaaattccatggatgggaagaatgtggatacagttttgatggaacttggagtacgttttcatcgacttatctatgagcatcttcaacaatattcctacagttgtatgggtggcatgttggccatttgtgatgtagccgaatataggaagtgtgccaaagacttcaagattccaatggtattacatctttttgatactctgcatgctctttgcaatcttctggtagttgccccagataatttaaagcaagtctgctcaggagaacaacttgctaatctggacaagaatatacttcactccttcgtacaacttcgtgctgattatagatctgcccgccttgctcgacacttcagctgagattgaatttacaaaggaattcagtgtcagttcctttacagaggaatgtcttatacttcagcagccctcggttgatagaaagcacaggagataccttatgacacagccaacattttgtgaaacaatgactggaacaaaacagcagccatacttacctttgaggttttatttaaagtttggataccactagctatattttgcttttttcccctcacattgaattttaattccattcttgaatgtagaaatttcagattctctaaaactacatgtcactgtttttatcctagaaaatgttgctgtcagaaggcaaaggaaatgttaccagtgttttcggttcttgtacttttaacatattccatttagaaattttgccattctgttttccattaataataggtgaaatacaggaaaactacatttgttattcctcagtttttaatgaccttttcagcatcaattgttaatcagattattttaggttttcgtaaataatttttttgcctctttcaaaaggttaacaattaagcatactttctgcagttggttgattggatttttttctgaggtacagcattaatactagtccaaaaaatgtcataaactgaactaaaatgatgaactattttatgtagacattaggagtggatcggaatacttctgctttctgggtaaaacttaaaagtttactatttcttatttggtaaatagattttaagccaattctagtaagaaattaataaaactaccttattttgtatttcacttaaggtggaggaccttaactaaaggaccatatttattcattattttaatattataagggaagtaaaaaaaagtgaggtatagtctaaatggtgcatataggaaatactgacagtgtttagcaacatgcagccctttgagatttctgtcgtaatgctaaacttgaataagatggaatggctgaacatgtggttagtcttttattttaagaagaattgagaattgatagatttggagatgagctttgcaaaggctgtttgcttttcatgtctataggtctgtcattgtcctttttcaaagcatttctgaagttattcctacttggatatagttaatggaattggcttaatttgatgacataataaatcacttataaaattttaaatatcaagtgaaaatttagaaaggccattactattctataaaccttataaacttgctctgggagaatgcattctaaattatatatagtgtttcagctcccattgtggtgttcatagtcttctaggaacagataaacttaagtattcaattcactcttggcattttttctttaatataggctttttagcctatttttggaaaactgcttttcttctgagaaccttattctgaatgtcatcaactttaccaaaccttctaagtccagagctaacttagtactgtttaagttactattgactgaattttcttcattttctgtttagtccagtgttaccaaggtaagctggggaatgaagtataccaacttctttcagagcattttaggacattatggcagctttagaaggctgtcttgtttctagccaagggagagccagcgcaggttttggatactagagaaagtcatttgcttgtactattgccattttagaaagctctgatgtgaattcaaattttacctctgttacttaaagccaacaattttaaggcagtagttttactggccatttaagctctttgtacagtgtcaatttgtaaaaaagaaaaaacgaaaaaaaatctcaaataaaacatgagataacattttaagacttccaaatcagagaagtgcttcaaattattttgtttggattaatttttaaaatgtaaagcatatacttgttgcttagttattttgtttattattttcatgtttgagttctgtgcaatattttctattatgtccgttgataggacagtgacaaaattcgtaagtgaatacttaatttaaaagtgttaacattaatgctcaataaacaaattccctgcagttgttttttttatttcactctttttatattttagagccatccatcctgaattttataaatgattttttatttaaaaatttgagatttttaaaatttttcacagcacaggtcttctcattttcttttttagcaaaaaatacttgactatataaacaagactagaaatttatcctaaacagatggtctttctctgagggaaaaaaaaaaatgtgtcatgtgaggcaatatgcattctttgtattctgattttttaagtgttttcatatttatagccatcacaaaattttgcccaaagtgtatggctcagaagagatgatcaataactaaaatgtttttcgttttgcacatggtaaaattttaggtagagagtggagctttgtataattggtaactttaaccaacatttacgtaagtacggtctttgcagtattacacaataccgcatgagctaatatgcagtatttaggtaatgcattgaatgaagttgaaaatatgctcttaacacactgtgcattgtttttctaaaattgagaaatatctgaaatacagaatacgaatttaataaaggaagcctaccttatgtaaattatgatgttgaaaatgacagtcaaccagagtagatgaagtgtccttatgaagaattattaaatagtagctggatggatctttagatggatgaccacctgaccattccaggacaatttttggtcccattttgaggattgccatagttgcaagtccttaggatcttccttgttttaaaaaactatcaaagtaggttaaattaaaatctaatttaaattaggttaatttatattacattgtagatcattcttttttcccccctctttcacttctaaatattttgctttctaaatactagccttctggttcacagtgaaataatttaattatcaatcagtagattgattccaagtggagaattcactgcttccctaaaatgcgtttttcttacctgtaatggtgaatatttacaaggatctggataaagagattttgatttttgaaatgccacaaaaccccttaaagtggtcaagtacctaaggtagtggctaaggcatgcttgaactgtgtttgagagacagcagttcagtcagtacataatttgttggtgactaacaaagctcacatctgggagattaactttttttaacgcaaaaatattctgcacattacccatatattgttgaattttacatacaaagcattttgtgctttcattcaattagtttaactatattcagtttctgtattatttctctctgatctatcctgtaattattctatactttagaagaaaagatcagttcatattgttagactgaataattctacatgaagttaaaagttagcaatttaaaaaattttgctgcataataaagataattatagttacatgtattgatttaagtctcacacactgtgctaataagtcctttgcacatattattggattctagagcaaccctaggatttgggtactattatttccatttgacagatgaaaaacctaatgcatagaaagataagtagaccagtcaaggtctacagctagtaaaatgctcagattgaaacctaaatcttttctcactcacttttaggttctatatgctattctccttacgtaacgttaaatagatcctttagtttgataggttcattagttttgcttaatcgttgcttccaatatgattcttattgtagtatttatattacaaagttggcatacagggtcaatatctaatttactgttgtgtttttcttaatatgttcaatgtatggtcatactttttaaatttgattttttaaatattataagtggtcatgaaattttaatgttaagtttgtacctaatagaaatatgtctatcacaaatctttattggtattattttatatacttttccagcttgataattttcacaatagaaagagaccaaatattttgtactatattttgtgacatagaagtaaatgacaactctaccttggaagatatgaagaaatcagtgtttttatgttcaaaaactattttaaatgtcataggcttgccaattgtgttaactatttagtacattggtagtttttaaatgactaatgctggagtgaaaatgtaaggcaaaatatttagtatattaacagtagatagtcattttcatgtaatcagaattgcatgttaagggttttaaaagctgtcataactcttaccttttatttctaccagtgatcaatcatttctctttacaaatttagggaggaaacaactgttcaaatgtataggggacagaaacctgacatttagagaacagaaattttaattgccaaattaaagcagctaggctgcccctgggcttaacaaaattcctatttttgaactagacccgaggtattttatcattattatttgataggtaccattaacctttgttttgtgattatcgacttttggggggaaagatgagtaattaaacacactcgcccattttctaagtggtttagaaggttgcagtctgcctcaccatacaaagccagtttaaataggaatatatcacatcatacttcacatagcagtcaacctcagaggaaagtcatttattcagaaggcatagattttgctagacagcagtgatgcattacaaatatataattatttgcactaatatttgagcaggtggaatggattagaacatggtcaacatcatgctgctgataacatgtatttttctatattaatatgtactgtgcaacatgtattaaaattgtcaataattcattttagccaagatactaatatttatattactgtgtttaagagacagtatccaactgagccacttttaatttaaaagtctgaaactggaattaagtttactttcaaaaatcacttaaattactttataatcagtgaaaggtcagtaaaatgtagaattataagtgcctagtgacttaataggaggaaatatggagggttaaggaaggaagtaggaacctggaataagaaagctaagtttcatttatagttccaatgagtgactttctttgttttcaccactgggaatcttaaatgaagaaagtgtcgtatcccttccagttatctttatgttaataaactaagtgaagtttggatagaactaacaaaggaattagtctccattggtggacttccagagttttgagattaaactttgagaggtgagaagccttcctgatgcccctgtaatcttaaattggcaggtgcctctaagtgaggccatccctctttgcctgcctatcattttaatctttatactgtaactggttcctttcaactctggccttttattgtagcacttttatcaagtctgcagcttcccagctacttgggaggctgaggtgggaagaacacttgaagctaggagttcaagaccactctgggcaacatagtgagtccctgtttttagaaaaataaataacctttaggtttttgctatagaaaatatccaaatagagtctggacaatgctggatgtaaagaaaactgtgaagctacctctaagcatattgtttgtgaatactgtgtaccatttagaggataacatgggggattcacatgaagttatgtgaaaatattttataaggaataatacctaagtgcctctcttaagttctccagtagaatgtattttcaatttttgccacaagggggagaagttatttttatagtaatatgtacatttttttattttaaaaatagaattcacacaactttacagcatctatgaacattttgctatcccaattatgtgtgtgtgtgcatgtgtgtaaacaagattctgaaagtcttgcatgagaaaaatttcaaaggaaattaataacaaaaccaaaacagttttgaagaacatgtgcacagtggacacaggaattgaacaaagtttaccatgattaacattatgttttcttagttatatatcacattgaattcctttatcaactctaataagaatctactgattagtgttctacattctgctttttaaagaaaaatttttgaaacaatcagacttaacagaagggttgtaaatactgtacaaataaaatttttcccttttgagaataaaaaaaaaaaaa

SEQ ID NO: 2065 - DNA, 2818 bp, Homo sapiens
ccctactccgcctctcgggatcctttaagaggcggggcttggctgccagctccgcggcccgggcaaaaggctgggactttactccgggtggcggcgaggacgagtctgtgctccatcagctgccgcacccgccgcctcccgcccccaaaccccatccccgcggttgagccacgatgagcggcagagtcggcgatctgagccccaggcagaaggaggcattggccaagtttcgggagaatgtccaggatgtgctgccggccctgccgaatccagatgactattttctcctgcgttggctccgagccagaagcttcgacctgcagaagtcggaggccatgctccggaagcatgtggagttccgaaagcaaaaggacattgacaacatcattagctggcagcctccagaggtgatccaacagtatctgtcagggggtatgtgtggctatgacctggatggctgcccagtctggtacgacataattggacctctggatgccaagggtctgctgttctcagcctccaaacaggacctgctgaggaccaagatgcgggagtgtgagctgcttctgcaagagtgtgcccaccagaccacaaagttggggaggaaggtggagaccatcaccataatttatgactgcgaggggcttggcctcaagcatctctggaagcctgctgtggaggcctatggagagtttctctgcatgtttgaggaaaattatcccgaaacactgaagcgtctttttgttgttaaagcccccaaactgtttcctgtggcctataacctcatcaaacccttcctgagtgaggacactcgtaagaagatcatggtcctgggagcaaattggaaggaggttttactgaaacatatcagccctgaccaggtgcctgtggagtatgggggcaccatgactgaccctgatggaaaccccaagtgcaaatccaagatcaactacgggggtgacatccccaggaagtattatgtgcgagaccaggtgaaacagcagtatgaacacagcgtgcagatttcccgtggctcctcccaccaagtggagtatgagatcctcttccctggctgtgtcctcaggtggcagtttatgtcagatggagcggatgttggttttgggattttcctgaagaccaagatgggagagaggcagcgggcaggggagatgacagaggtgctgcccaaccagaggtacaactcccacctggtccctgaagatgggaccctcacctgcagtgatcctggcatctatgtcctgcggtttgacaacacctacagcttcattcatgccaagaaggtcaatttcactgtggaggtcctgcttccagacaaagcctcagaagagaagatgaaacagctgggggcaggcaccccgaaataacaccttctcctatagcaggcctggccccctcagtgtctccctgtcaatttctaccccttgtagcagtcattttcgcacaaccctgaagcccaaagaaactgggctggaggacagacctcaggagctttcatttcagttaggcagaggaagagcgactgcagtgggtctccgtgtctatcaaatacctaaggagtccccaggagctggctggccatcgtgataggatctgtctgtcctgtaaactgtgccaacttcacctgtccagggacagcgaagctgggggtggcggggggcatgtaccacagggtggcagcagggaaaaaaattagaaaagggtgaaagattgggacttaacacttcagggaagtcagctgccggggagaaacttgctcctaaatgaacacataagtttagatcgcaatgaggagtagcagggtagctggttgctagagttacggtggggatcagaaactcttccaaacattttagcactgaggctggggtagcttttggcttttcccaggtctcaggaggtggcctgagtcagcacacatcttcccactcggtagacaggctggcctctccctcactttgagactttggcaactcctgggccacacggcctgcctctttgattactaatgattgtcagtgactcagagcttcctgggacttcgggtacccacccgctgttctccatgcaaacaaagcgccagggaaatgacccacagggatcgcagctgcagggagggccagggaggttgggggtgggagtgaatgctaaaagcagatcgtccagtgcccttttcagtgctaccggcctctcaccaagcagtcctccatgtgagcaaccccgagacaaaaatgctaagtgggatcaagagagcagcactcggagagggtgtttgccagtctgagtgtcccgcggtgcccgccaacccgcttcctgactgacctgagcaaggtcttactaagcagtcccatctctgtgggaggcatgcaacgcgtgcagggagttcaggtgccggtcggcgtagccaggcctggaggccccccaggcaggaggccgcccaaaggcggggccggcgtctcgcagactaggggctgggggcggccacagacggcctcgaaaccacagcccttaccccaatcccacgagccccgccaacgaaccacaggtgctgggctttagagaacatgggaaggcggccccagacctggcgggaacgcctttccctcagagccaggccccggccccgtctgggaagctcatcttgcgaagctgagggagctcagggcaaaggccaggctagcgcggaccggaaggggccgaggctgcacgggcctctgccagaacgctcaggacatcccggcctgggtttacaacgctgttaggaaaattaaccaatgaataaagcaacgttcagtgcgca

SEQ ID NO: 2066 - DNA, 6387 bp, Homo sapiens
ccggccagggcctccctccttctctctaggtttggctgccgccttctagccgggcgttcgcggccccgccggcccgactctcaagcctcagctcccaggctaggctgtggccgccggtggcctggggagagtgcggcgccatgcctcgggcttaatgcgcccccccctcttctcccagtcttcagtcttaagtcgttagcctcctccctccgctttcagcagtggtctttcagctctcttcttgtgcgctgttgtcgaccccgaccagccccttccaacccagtcatcatgtcccagccgggaataccggcctccggcggcgccccagccagcctccaggcccagaacggagccgccttggcctcggggtctccctacaccaacggtcctgtccaaaatgcattgctgtcttcacaagagtcagtgagccaaggatacaatttccagcttccaggatcctaccctcatccaataccagcaaagactttgaatccagtctctggacagtctaactatggtggttctcagggatctgggcagactcttaatagaccacctgtggcctctaatccagtgacaccttcgcttcatagtggtcctgctccccgaatgccattacctgcttctcagaacccagctactacaccaatgccttctagtagctttcttcctgaagccaacctgccaccacctttgaattggcaatataactatccatccacagcctcacaaacaaaccattgtcctcgtgcatcatcccaaccaactgtatctggaaatacaagtttaaccacaaatcatcaatatgtttcttctggatatccttcacttcaaaatagcttcataaagtcaggtccttctgtacctcccttagtgaatccacctctgcctacaacttttcaaccaggagctcctcatgggccccctccagctggaggcccacccccagtgagggccctcacgcccctgacatcatcatatagagatgtaccccagcccttatttaattcagctgtcaaccaagaaggtattacatcaaataccaataacggatctatggtggtccacagtagttacgacgagattgaaggaggtggcttattggcaacaccacagcttactaacaagaatcccaaaatgagccgaagtgttggatattcatatccctccttaccacctggttatcagaacacaacaccacctggtgcaactggagtaccaccctcttccttgaattacccaagtgggccacaagcctttactcagactcccttaggtgctaatcatttaaccacaagcatgagtggattaagtctacaaccagagggtctaagagttgtcaatcttcttcaagaaagaaacatgcttccgtcaacacctttgaagcctccagttccaaatttgcatgaagacatccagaaactcaactgtaacccagagttatttcgatgcacgctgactagcattcctcagacgcaggccttattgaataaagccaaacttcctttggggctgctgcttcatcctttcaaagacttagtgcaattgcctgtggttacctccagtacaattgtgagatgccgttcatgcaggacgtacatcaatcctttcgtcagctttcttgatcaaaggagatggaagtgtaacttatgttatcgagtcaatgatgttcctgaagaattcttgtacaaccctttgaccagagtttatggagaacctcacagaagaccagaagttcaaaatgctactattgagtttatggctccttcagaatacatgttacgaccacctcagcctccagtgtatctctttgtatttgatgtgtctcacaatgcagtcgaaactggatacttgaattcagtttgccagagtttgttagacaatctggatttgcttcctggcaacactagaacaaaaattggcttcataacatttgacagtacaatccatttctacggtcttcaggaaagtctctctcaacctcagatgctaatagtttcagatattgaagatgtttttatacctatgccagagaacttattagtaaacttaaatgaaagtaaagagctcgtgcaagatttactgaaaactttgccacaaatgtttaccaagactctggagacccagagtgccttgggtcctgcactgcaggctgcctttaagctgatgtctccaactggtggtcgaatgtctgtctttcaaacacaactcccaactcttggagtgggagccctgaaaccacgagaggaaccaaaccacaggtcatctgctaaggatatacacatgacaccatccactgacttctataagaaattagccttggactgttctggtcagcaagttgctgttgacttattccttctcagtggacagtattctgatttggcttctctgggttgtatttctcggtattcagcaggtagtgtctattactatccctcttaccatcatcagcacaacccagtccaagtacagaaattacagaaggaactacagagataccttactcggaagattggctttgaggcagtcatgaggattcggtgcaccaaaggtctttccattcatactttccatggaaacttctttgttaggtcaaccgacttactgtctttgcctaacgtcaacccagacgctgggtatgcagtacagatgtcagtggaagagagtcttactgacactcagttggtttcttttcagtcagcactcttgtatacatccagcaaaggcgaaagaagaattcgtgttcatactttgtgtttgccagtagtttcgactctgaatgatgtctttcttggagctgatgttcaagcaatttcagggttattggccaatatggctgttgacagatctatgactgccagtctgagtgacgctcgggatgctctagtgaatgcagtcattgactccctttcagcttaccgttcttcagtcttaagtaaccagcagcctggactcatggttcctttttctttgcggcttttcccactttttgtgttggctctccttaaacagaaatcattccagactgggacaaatgcacgtctagatgaacgcatttttgctatgtgtcaagtgaaaaaccagcccttggtttaccttatgctcacaactcatcccagtttgtatagagttgacaatctctcagatgagggagcactcaacatcagtgatagaaccatacctcagccccccattcttcagctttcagtggagaagctgagcagagatggagctttcctcatggatgcaggctctgtactgatgctttgggttggaaaaaattgtacacagaattttctcagccaagttctaggagttcaaaactatgcatcaattccacagcctatgacagaccttccagaacttgatacaccagaatctgccagaataatagctttcatctcttggcttagagagcagagaccatttttcccaatactttatgtaataagggatgagagtccaatgaaagcaaacttccttcaaaacatgatagaagacagaacagaatctgcattatcatattatgaattcctgttgcatatacagcaacaagtgaataaatgaatgaatgaagaaatttgacttatttttaaggaatgtcacgatagtgcagaatacctggaaatgtgtaataccttctttttctattatgtttgtggactaatgtgatgattgagatgttctcactgtgatttcaacaacctatagcaaataaaagaccacagcagagaatcaaacatgcaactctgaaatactgtatttttcaaatcagaatatagctacgtatgattggatacttttttcttgccaattatgtttgagttgttatggattaaaataagaatattgcagaggcaaagtacattttgtaaaataaagatttctgtgttctacatgtatatttctcatttttaatttttctgaatctttggctgctacatttaaaacctcacaaacctaagtgttgcagggaagttacaaattgattggtagtgatgtttttaaaataaaaacaatggaaagtaaatataatgtaggaaaactagaattcattccccacacgtgtcttttttttttctttgttaagggaaaggatcatgttgactaaaactaaactaattctagtatagcttgagaaaaatatgaagaaacacattcaagctttaaaatctgtcagtattctttatgcttgaagaacaaagtcactttgatttgaagtgagaactatcattaggtggttttctgatttcctgatgaagagttggacatactgtcttaatctatagtgaaaagaatttgagctgtcttcataaacactgggactagcaatgataatagggagataagaaactttaattatcttgatcctttaagtggattttatttggtgcatttctgctctgggtatataataaaagtgggggtttttggtgaaatgagtgaagaaatgaaaggtttctaaagtgctatccaaatacatcagtaacatttttctaaggagtttaattgttaaattggaagtcattcataagaaatatttatgcttgaatatgaaaatctatgaaagcataaatgctgctgtttgatttggtggatattaagattatacacatccaacatattaaagttatgaaagaaacttgacttctgaaaatccttaagagactgctttcttgattcagctagagaaatattatagtcaaaactattgagtgaattttgtttacaaataggtaaattatacatttgtatatttaaagtgctgtgacatagtatctttaagagtttggctcagttttcacagattcattttgtcttaagaatttcttaaatatgttcatgtataatacttgatcaaaatatttttgggttttttgttttgttttaatgggttagaaaatgtttacaatcttggtcttatatgatcaccaatggaatagtaacttccaggtttatatcaatatgagctgactttaactgagttgtttgggatagggaagaagcagtccctctacagtatacaactactgcttgccagctggatcaaaataatcatgttttatgaaaatatctcccttaagcagtgttaaggttggtttgcagtgtgtaagtggcacattgaactggaagttttcttgaaagctgcttcatctattaagaagcaattttcaaattgtagcgaattatattatcccctcttttaaagaaacagtcgttatatgctgatgtttcttaaaataactaaaatgttcctcttaatgtgattttaaatggagttatttgtaggtcctttcttagtagtaaagaatcttctagagggaaacatttgtgcttttagggataatcttccttgtgcctcactacatccctaagtgggtatgactcttgttattaccacatgcttttttagtatatttcacaaatttacttttaaatattattttagatacggtgtaacatgtgcaattcagaataattttataacaggtcatgaaaaacataactttagttaggattcacaatatttgttctccacataatgagagaatgaatgagcctttggagatactgatataaggcaattattttttgcaatgttgaatgtgttttttagtttgattctttttttttcccccaatagggcactacctgccatatcatcttgtattactttttgatgtaaagcgactaatatttacactatgccatattttttttaattatagttgtaaattatgaaagatccttgaattttctacagatctacaactactaatgtaacagacaagggcaatcttggtatttaaatctgagcatggcagttctaccataaaaagtactctatttttctaatttctaggatttttaaaataacatttctgtaagtctgacatactaatagtcactcaagcagtaccatttattttagtttgcatatattttcactgtttttaatttaatgtattgagtctaatagactgttttgcaataattagaataaagatttatttcttctaatcaaagatgcataacagctattatctaggggaccaccaaatgtgatttcaaaattttgttaactattacaaatgtaatccttatatagaaattttaattttgtaaagtagtgtataatattgtaatattaaattcttgttcttaaattcaaatatgtattgatcttcaatgtgctgtgttaaatcttgcttctctgaaaagttggagacaagatttgtcttcctttttacagtttgtaattttcactgttttattcctgttaaaaaaaaaaaaaagtcatttgtaacccatgcagaccattgtttgatctatgctaacttatcaacttggctattcaataaagttaattgaaaagagcttata

SEQ ID NO: 2067 - DNA, 3988 bp, Homo sapiens
tgcaactccgagcgtgagtccaggctaaggggacgccggccggggaagaggcgcggcgggagaagcgaccgcagcgggagcccggccaccgagggctgccggcactaggcgcagagccgccagcgctcggaagcccgcggggtgcgggagcgggaacagacttcttttgtagaattatcctatggaatgatattttcataatgagtcaacaaggttacgtggctacacctccgtattctcagcctcagcctggaataggcctttctccacctcattatgggcactatggggatccgtcgcacacagcatctccaacaggtatgatgaagccagcagggcctttgggggccaccgccactaggggaatgttgcctccgggtcccccacctcctggaccccatcagtttggtcagaatggagctcatgccactggtcaccctccccaaagatttccaggccctccacctgtcaacaatgtggcatcctcacatgcaccataccaaccctctgcacaatcttcttatccaggtcctatatccacttcatctgtcacccagctgggcagccagctcagtgctatgcaaatcaacagctatggttcaggcatggctcctccaagccagggaccccctggccctctgtcagccacatcattgcagactcctccacgacctccacagccttccattttgcagcctggatctcaagttcttccaccaccacccaccacactcaatggtcctggtgcctcacctttgcctctaccaatgtacagaccagatgggctctctgggcctcctcctccaaatgcccagtaccagcccccacctcttccaggccagaccttgggtgctggatatcctccgcagcaggccaactctggtccccagatggcaggcgcacaactgtcttacccaggaggcttccctggaggtcctgcacagatggctggtccgccacagccccagaagaagctggatcctgactctatccctagcccaatccaggtgattgagaatgatagagccagcagaggaggacaagtttatgccaccaacaccagaggccagatccctcccctggtcactacagattgcatgatacaagaccaaggaaatgccagtcctcgattcatccgttgtacaacatactgttttccatgcacgtcagatatggctaagcaagctcagattccattagctgctgtcatcaagccctttgccaccattccttcaaatgagagtcccctttacttggtaaatcacggcgagagtggaccagtcagatgcaacaggtgcaaggcctacatgtgcccatttatgcagttcatcgaaggaggaaggagatatcagtgtggattttgcaactgtgtgaatgatgttccaccattctatttccaacatctggaccacattggaagaagactggaccactatgagaaaccagagttatctctaggatcttatgaatatgttgccactttggattattgcagaaagagtaagcctcccaacccaccagcctttatcttcatgattgatgtttcatatagtaacataaagaatggacttgtcaagctcatatgtgaagaactgaagaccatgctggaaaaaattccaaaggaagagcaagaagagacgtctgcaattcgagtgggttttatcacatataacaaagttctccatttctttaatgtgaagagtaatctggcccagcctcagatgatggtggtgactgatgttggagaagtctttgttcctttgttggatggtttccttgtcaactatcaagaatcccaatctgtgattcataatttgttggaccagattccagacatgtttgcagactctaatgaaaatgagactgtctttgcttctgtcatccaggctggcatggaagcactaaaggcagcagactgtcctgggaagctgttcatcttccattcttccttgccaactgctgaagcaccagggaagctcaaaaacagagatgacaaaaaactggttaatacagacaaagagaagatacttttccagccccaaacaaatgtctatgactcattggccaaggactgcgtggctcacggctgctctgtgacactcttcctctttcctagtcagtatgtggacgtggcctcgctggggctggttcctcagctcactggaggaaccctttacaaatacaacaatttccagatgcacttggatagacaacaatttttgaacgacctcagaaatgatattgaaaagaaaataggctttgatgctattatgagggttcgtaccagcacaggtttcagagccactgatttctttggtggaatcttgatgaacaacaccaccgatgtagaaatggctgccatcgattgtgacaaggcagtgaccgtggagttcaagcacgatgacaaactcagtgaagacagtggagccttaatccagtgtgctgtgctttacacgacaatcagtggtcaaagaagacttcggattcacaatcttggcttaaactgcagctctcagctagctgatctttataagagctgtgagacagatgctcttatcaacttctttgccaagtcagcttttaaagcagttctccaccagcctttgaaggtcatccgggaaattctagttaatcagactgcccatatgttggcatgttaccggaagaattgtgcaagtccttctgcagcaagccagcttattctaccagattccatgaaagtattgccagtgtacatgaattgcttgttgaaaaactgtgtactactcagcagaccagagatctcaactgatgaacgagcataccagagacagctggtcatgaccatgggtgtggctgactctcagcttttcttctacccacaacttctgcccatacacacgttagatgtcaagagtacaatgttacctgctgccgttcgttgctctgagtcccgtctttcagaagaaggaatattcttactggctaatggtctacacatgttcctgtggttgggagtaagcagcccaccagaactgatccaaggaatatttaatgtgccatcttttgcacatatcaacacagatatgacattgctgcctgaagtgggaaacccatactctcaacaactcagaatgataatgggtattatccaacaaaagaggccatattcaatgaagctcacaattgtaaagcagcgagaacaaccagaaatggttttccgacagttcctggtagaagacaaaggactttacggaggctcttcttatgtggatttcctttgttgtgttcacaaggagatctgtcagctgcttaattaattgaaacttctctgtcattgatgttgcatttccaaggagataatctccttcttggtgcctaattttctagatgataataggctagttttgatttcttgctcattttcagaataactttccaggaagagatggcatttagaacttcagctttggtgctcaggtataaagccaattaaggtacaattgtaccataaagggaacaatctgtttctgattgcacagtttctaatttttaaaactgatgtggtttgcatttcataaaaggcaaagtttacagaaccataaacattctcaattttctttatgctagacatataaattatttttcaaactgtatagatttggggtaaaaagttgtctcagttcctctcccaattgcaatgagaaaaaaaagcttaatttttacattatacttaattttctaaaaccatgtaactccattgaacatttttcaacttaaggtctgcatagcagacttttaataaccttgggatttatctggtagaacaatatgtgttctacatttttttcataattatatattgtgtatgttaaaactattttccagttgttttgtctgtaaaactgtctttatcaatatgcttaatggttctttgtacaattttgaaagtttctacctgtatataatggatgttaaccagtatcaataaatcacttcgtataatctt

SEQ ID NO: 2068 - DNA, 3306 bp, Homo sapiens
cggatataggaagtgttgggggaacggccgcttcccgttcaacgctttattgaggggcgtatcctagtggcccccatccggtctccgttttggaagacccgcctcggcacagccaggctcagtccggccttgcgctgagaaaagatgacagcaatcaagcatgcattacaaagagacatttttacaccaaatgatgaacgcctgctgagcattgtgaatgtctgcaaagcaggaaaaaagaaaaagaactgttttttatgtgccacagtgacaactgaacgccctgtgcaggttaaggtggtcaaagtcaagaaatccgataagggagatttctacaaaaggcagattgcatgggcccttcgagatcttgctgtggtagatgccaaagatgctatcaaagaaaatcctgaatttgatttacactttgaaaaaatatataaatgggttgccagcagcactgctgaaaagaatgcatttatttcatgcatttggaaattgaatcagcgatatctccggaagaaaattgattttgtcaatgttagctcacagcttttggaagaatctgttccaagtggagaaaatcagagtgtgacaggaggtgatgaagaagtagtagatgaataccaagagttaaatgcaagagaagaacaggatatcgaaataatgatggaaggctgtgaatatgcaatctcgaatgcggaagcctttgcagaaaaattgtccagagagctgcaggtgctagatggggctaacatccagtcaatcatggcatctgaaaaacaagtcaacatcctgatgaaattgctagatgaggctctaaaggaggtagatcagattgaattgaaactgagcagttatgaggaaatgctccaaagtgtaaaagaacaaatggatcagatctctgaaagcaaccacctaattcatcttagtaacactaataatgtaaaactcctatctgagatagagttccttgtgaaccacatggacttggccaaaggtcatataaaggcccttcaggaaggagatcttgcttcttccagaggcattgaggcctgcaccaatgctgctgatgcccttctgcagtgcatgaatgtagctcttcgaccaggccatgacttgcttctggcagtcaaacagcaacagcagcgattcagtgatttgcgagagctttttgcccggagactggccagtcacctcaacaatgtttttgttcaacagggtcatgatcagagttcgactcttgcccaacactctgttgaactgactttacccaatcatcatccatttcatagagatttgctccgatatgccaagctgatggagtggctaaagagtacagattatggaaaatatgaaggactaacaaagaattacatggattatttatcccgactatatgaaagagaaatcaaagatttctttgaagttgcaaagatcaagatgactggcacaactaaagaaagcaagaagtttggtcttcatggaagttcggggaaattaactggatctacttctagtctaaataagctcagtgttcagagttcagggaatcgcagatctcagtcatcttccctgttggatatgggaaacatgtctgcctctgatctcgatgttgctgacaggaccaaatttgataagatctttgaacaggtactaagtgaactggagcccctatgtctggcagaacaggacttcataagtaaatttttcaaactacagcaacatcaaagtatgcctggaactatggctgaagcagaggacctggatggaggaacattatcacggcaacataattgtggcacaccactgcctgtttcatctgagaaagatatgatccgccaaatgatgattaaaatatttcgctgcattgagccagagctgaacaacctaattgcattaggagacaaaattgatagctttaactctctttatatgttagtcaaaatgagtcatcatgtgtggactgcacaaaatgtggaccctgcttctttcctaagtactacattgggaaatgttttggtgactgtcaaaaggaactttgacaaatgcattagtaaccaaataaggcaaatggaagaagtaaagatctcaaaaaagagtaaagttggaattcttccatttgttgctgaatttgaagaatttgctggacttgcagaatcaatcttcaaaaatgctgagcgtcgtggagacctggataaagcatacaccaaacttatcagaggagtatttgttaatgtggagaaagtagcaaatgaaagccagaagacccccagggatgtggttatgatggaaaactttcaccatatttttgcaactctttctcgattgaaaatctcatgtctagaagcagaaaaaaaagaagccaaacaaaaatacacagatcaccttcagtcttatgtcatttactctttaggacaacctcttgaaaaactaaatcatttctttgaaggtgttgaagctcgcgtggcacagggcataagggaggaggaagtaagttaccaacttgcatttaacaaacaagaacttcgtaaagtcattaaggagtaccctggaaaggaagtaaaaaaaggtctagataacctctacaagaaagttgataaacatttatgtgaagaagagaacttacttcaggtggtgtggcactccatgcaagatgaatttatacgccagtataagcactttgaaggtttgatagctcgctgttatcctggatctggtgttacaatggaattcactattcaggacattctggattattgttccagcattgcacagtcccactaaaccttgtgaaagaagaaaagataactgaatgaagcatttgagtataacagacactataccaaaataccaagcaactgttttgagaacccagacttaaaattttatgtattattaaatgttagataaatgggtagtaccatactacaaatatttaaatgcaaaattaccaacctatatagcagttttatttgccctataggttgcatactaacttaagcattcatgtcaccataaaatgcctttagcatttctcaatgactggatgggaaattttcctttattgcctagctgcttgtgtttgagtggttgtcctatgagcaatgcatttggagttcttcagctttcactacttctctgttgcttgctaatcatgtaactactaaaatactgtacaaaattgttttttcacactaacaaatgtgtatatggagaagagggctcatgtgatgatcatttgtgaacttagatttttgaggattatgtgactagtaataaatgtgaaataaattttcaaaaaagttg

SEQ ID NO: 2069 - DNA, 3351 bp, Homo sapiens
cggatataggaagtgttgggggaacggccgcttcccgttcaacgctttattgaggggcgtatcctagtggcccccatccggtctccgttttggaagacccgcctcggcacagccaggctcagtccggccttgcgctgagaaaagatgacagcaatcaagcatgcattacaaagagacatttttacaccaaatgatgaacgcctgctgagcattgtgaatgtctgcaaagcaggaaaaaagaaaaagaactgttttttatgtgccacagtgacaactgaacgccctgtgcaggttaaggtggtcaaagtcaagaaatccgataagggagatttctacaaaaggcagattgcatgggcccttcgagatcttgctgtggtagatgccaaagatgctatcaaagaaaatcctgaatttgatttacactttgaaaaaatatataaatgggttgccagcagcactgctgaaaagaatgcatttatttcatgcatttggaaattgaatcagcgatatctccggaagaaaattgattttgtcaatgttagctcacagcttttggaagaatctgttccaagtggagaaaatcagagtgtgacaggaggtgatgaagaagtagtagatgaataccaagagttaaatgcaagagaagaacaggatatcgaaataatgatggaaggctgtgaatatgcaatctcgaatgcggaagcctttgcagaaaaattgtccagagagctgcaggtgctagatggggctaacatccagtcaatcatggcatctgaaaaacaagtcaacatcctgatgaaattgctagatgaggctctaaaggaggtagatcagattgaattgaaactgagcagttatgaggaaatgctccaaagtgtaaaagaacaaatggatcagatctctgaaagcaaccacctaattcatcttagtaacactaataatgtaaaactcctatctgagatagagttccttgtgaaccacatggacttggccaaaggtcatataaaggcccttcaggaaggagatcttgcttcttccagaggcattgaggcctgcaccaatgctgctgatgcccttctgcagtgcatgaatgtagctcttcgaccaggccatgacttgcttctggcagtcaaacagcaacagcagcgattcagtgatttgcgagagctttttgcccggagactggccagtcacctcaacaatgtttttgttcaacagggtcatgatcagagttcgactcttgcccaacactctgttgaactgactttacccaatcatcatccatttcatagagatttgctccgatatgccaagctgatggagtggctaaagagtacagattatggaaaatatgaaggactaacaaagaattacatggattatttatcccgactatatgaaagagaaatcaaagatttctttgaagttgcaaagatcaagatgactggcacaactaaagaaagcaagaagtttgctacactgcctcgaaaagaaagtgctgtcaaacaggaaacagagagtcttcatggaagttcggggaaattaactggatctacttctagtctaaataagctcagtgttcagagttcagggaatcgcagatctcagtcatcttccctgttggatatgggaaacatgtctgcctctgatctcgatgttgctgacaggaccaaatttgataagatctttgaacaggtactaagtgaactggagcccctatgtctggcagaacaggacttcataagtaaatttttcaaactacagcaacatcaaagtatgcctggaactatggctgaagcagaggacctggatggaggaacattatcacggcaacataattgtggcacaccactgcctgtttcatctgagaaagatatgatccgccaaatgatgattaaaatatttcgctgcattgagccagagctgaacaacctaattgcattaggagacaaaattgatagctttaactctctttatatgttagtcaaaatgagtcatcatgtgtggactgcacaaaatgtggaccctgcttctttcctaagtactacattgggaaatgttttggtgactgtcaaaaggaactttgacaaatgcattagtaaccaaataaggcaaatggaagaagtaaagatctcaaaaaagagtaaagttggaattcttccatttgttgctgaatttgaagaatttgctggacttgcagaatcaatcttcaaaaatgctgagcgtcgtggagacctggataaagcatacaccaaacttatcagaggagtatttgttaatgtggagaaagtagcaaatgaaagccagaagacccccagggatgtggttatgatggaaaactttcaccatatttttgcaactctttctcgattgaaaatctcatgtctagaagcagaaaaaaaagaagccaaacaaaaatacacagatcaccttcagtcttatgtcatttactctttaggacaacctcttgaaaaactaaatcatttctttgaaggtgttgaagctcgcgtggcacagggcataagggaggaggaagtaagttaccaacttgcatttaacaaacaagaacttcgtaaagtcattaaggagtaccctggaaaggaagtaaaaaaaggtctagataacctctacaagaaagttgataaacatttatgtgaagaagagaacttacttcaggtggtgtggcactccatgcaagatgaatttatacgccagtataagcactttgaaggtttgatagctcgctgttatcctggatctggtgttacaatggaattcactattcaggacattctggattattgttccagcattgcacagtcccactaaaccttgtgaaagaagaaaagataactgaatgaagcatttgagtataacagacactataccaaaataccaagcaactgttttgagaacccagacttaaaattttatgtattattaaatgttagataaatgggtagtaccatactacaaatatttaaatgcaaaattaccaacctatatagcagttttatttgccctataggttgcatactaacttaagcattcatgtcaccataaaatgcctttagcatttctcaatgactggatgggaaattttcctttattgcctagctgcttgtgtttgagtggttgtcctatgagcaatgcatttggagttcttcagctttcactacttctctgttgcttgctaatcatgtaactactaaaatactgtacaaaattgttttttcacactaacaaatgtgtatatggagaagagggctcatgtgatgatcatttgtgaacttagatttttgaggattatgtgactagtaataaatgtgaaataaattttcaaaaaagttg

SEQ ID NO: 2070 - DNA, 3656 bp, Homo sapiens
agcgatccgaggcccggccccggccccgccccgcgccgcgccgcgccgcttgccgccgggctagcactgacgtgtctctcggcggagctgctgtgcagtggaacgcgctgggccgcgggcagcgtcgcctcacgcggagcagagctgagctgaagcgggacccggagcccgagcagccgccgccatggcaatcaaatttctggaagtcatcaagcccttctgtgtcatcctgccggaaattcagaagccagagaggaagattcagtttaaggagaaagtgctgtggaccgctatcaccctctttatcttcttagtgtgctgccagattcccctgtttgggatcatgtcttcagattcagctgaccctttctattggatgagagtgattctagcctctaacagaggcacattgatggagctagggatctctcctattgtcacgtctggccttataatgcaactcttggctggcgccaagataattgaagttggtgacaccccaaaagaccgagctctcttcaacggagcccaaaagttatttggcatgatcattactatcggccagtctatcgtgtatgtgatgaccgggatgtatggggacccttctgaaatgggtgctggaatttgcctgctaatcaccattcagctctttgttgctggcttaattgtcctacttttggatgaactcctgcaaaaaggatatggccttggctctggtatttctctcttcattgcaactaacatctgtgaaaccatcgtatggaaggcattcagccccactactgtcaacactggccgaggaatggaatttgaaggtgctatcatcgcacttttccatctgctggccacacgcacagacaaggtccgagcccttcgggaggcgttctaccgccagaatcttcccaacctcatgaatctcatcgccaccatctttgtctttgcagtggtcatctatttccagggcttccgagtggacctgccaatcaagtcggcccgctaccgtggccagtacaacacctatcccatcaagctcttctatacgtccaacatccccatcatcctgcagtctgccctggtgtccaacctttatgtcatctcccaaatgctctcagctcgcttcagtggcaacttgctggtcagcctgctgggcacctggtcggacacgtcttctgggggcccagcacgtgcttatccagttggtggcctttgctattacctgtcccctccagaatcttttggctccgtgttagaagacccggtccatgcagttgtatacatagtgttcatgctgggctcctgtgcattcttctccaaaacgtggattgaggtctcaggttcctctgccaaagatgttgcaaagcagctgaaggagcagcagatggtgatgagaggccaccgagagacctccatggtccatgaactcaaccggtacatccccacagccgcggcctttggtgggctgtgcatcggggccctctcggtcctggctgacttcctaggcgccattgggtctggaaccgggatcctgctcgcagtcacaatcatctaccagtactttgagatcttcgttaaggagcaaagcgaggttggcagcatgggggccctgctcttctgagcccgtctcccggacaggttgaggaagctgctccagaagcgcctcggaaggggagctctcatcatggcgcgtgctgctgcggcatatggacttttaataatgtttttgaatttcgtattctttcattccactgtgtaaagtgctagacattttccaatttaaaattttgctttttatcctggcactggcaaaaagaactgtgaaagtgaaattttattcagccgactgccagagaagtgggaatggtataggattgtccccaagtgtccatgtaacttttgttttaacctttgcaccttctcagtgctgtatgcggctgcagccgtctcacctgtttccccacaaagggaatttctcactctggttggaagcacaaacactgaaatgtctacgtttcattttggcagtagggtgtgaagctgggagcagatcatgtatttcccggagacgtgggaccttgctggcatgtctccttcacaatcaggcgtgggaatatctggcttaggactgtttctctctaagacaccattgttttcccttattttaaaagtgatttttttaaggacagaacttcttccaaaagagagggatggctttcccagaagacactcctggccatctgtggatttgtctgtgcacctattggctcttctagctgactcttctggttgggcttagagtctgcctgtttctgctagctccgtgtttagtccacttgggtcatcagctctgccaagctgagcctggccaagctaggtggacagacccttgcagtgatgtccgtttgtccagattctgccagtcatcactggacacgtctcctcgcagctgccctagcaaggggagacattgtggtagctatcagacatggacagaaactgacttagtgctcacaagcccctacaccttctgggctgaagatcacccagctgtgttcagaattttcttactgtgcttaggactgcacgcaagtgagcagacaccaccgacttcctttctgcgtcaccagtgtcgtcagcagagagaggacagcacaggctcaaggttggtagtgaagtcaggttcggggtgcatgggctgtggtggtgttgatcagttgctccagtgtttgaaataagaagactcatgtttatgtctggaataagttctgtttgtgctgacaggtggcctaggtcctggagatgagcaccctctctctggcctttagggagtcccctcttaggacaggcactgcccagcagcaagggcagcagagttgggtgctaagatcctgaggagctcgaggtttcgagctggctttagacattggtgggaccaaggatgttttgcaggatgccctgatcctaagaagggggcctgggggtgcgtgcagcctgtcggggagaccccactctgacagtgggcacacggcagcctgcaaagcacagggccaccgccacagcccggcagaggggcacactctggagaccttgctggcagtgctagccaggaaacagagtgaccaagggacaagaagggacttgcctaaagccacccagcaactcagcagcagaaccaagatgggccccaggctcctccatatggcccagggcttaccaccctatcacacgtggccttgtctagacccagtcctgagcaggggagaggctcttgagacctgatgccctcctacccacatggttctcccactgccctgtctgctctgctgctacagaggggcagggcctcccccagcccacgcttaggaatgcttggcctctggcaggcaggcagctgtacccaagctggtgggcagggggctggaaggcaccaggcctcaggaggagccccatagtcccgcctgcagcctgtaaccatcggctgggccctgcaaggcccacactcacgccctgtgggtgatggtcacggtgggtgggtgggggctgaccccagcttccaggggactgtcactgtggacgccaaaatggcataactgagataaggtgaataagtgacaaataaagccagttttttacaaggtaaaaaaaaaaaaaaaaaaaaa

SEQ ID NO: 2071 - DNA, 3185 bp, Homo sapiens
ggcagtgagactgtaagcagtctgggttgggcagaaggcagaaaaccagcagagtcacagaggagatggccaactgccaaatagccatcttgtaccagagattccagagagtggtctttggaatttcccaactcctttgcttcagtgccctgatctctgaactaacaaaccagaaagaagtggcagcatggacttatcattacagcacaaaagcatactcatggaatatttcccgtaaatactgccagaatcgctacacagacttagtggccatccagaataaaaatgaaattgattacctcaataaggtcctaccctactacagctcctactactggattgggatccgaaagaacaataagacatggacatgggtgggaaccaaaaaggctctcaccaacgaggctgagaactgggctgataatgaacctaacaacaaaaggaacaacgaggactgcgtggagatatacatcaagagtccgtcagcccctggcaagtggaatgatgagcactgcttgaagaaaaagcacgcattgtgttacacagcctcctgccaggacatgtcctgcagcaaacaaggagagtgcctcgagaccatcgggaactacacctgctcctgttaccctggattctatgggccagaatgtgaatacgtgagagagtgtggagaacttgagctccctcaacacgtgctcatgaactgcagccaccctctgggaaacttctcttttaactcgcagtgcagcttccactgcactgacgggtaccaagtaaatgggcccagcaagctggaatgcttggcttctggaatctggacaaataagcctccacagtgtttagctgcccagtgcccacccctgaagattcctgaacgaggaaacatgacctgccttcattctgcaaaagcattccagcatcagtctagctgcagcttcagttgtgaagagggatttgcattagttggaccggaagtggtgcaatgcacagcctcgggggtatggacagccccagccccagtgtgtaaagctgtgcagtgtcagcacctggaagcccccagtgaaggaaccatggactgtgttcatccgctcactgcttttgcctatggctccagctgtaaatttgagtgccagcccggctacagagtgaggggcttggacatgctccgctgcattgactctggacactggtctgcacccttgccaacctgtgaggctatttcgtgtgagccgctggagagtcctgtccacggaagcatggattgctctccatccttgagagcgtttcagtatgacaccaactgtagcttccgctgtgctgaaggtttcatgctgagaggagccgatatagttcggtgtgataacttgggacagtggacagcaccagccccagtctgtcaagctttgcagtgccaggatctcccagttccaaatgaggcccgggtgaactgctcccaccccttcggtgcctttaggtaccagtcagtctgcagcttcacctgcaatgaaggcttgctcctggtgggagcaagtgtgctacagtgcttggctactggaaactggaattctgttcctccagaatgccaagccattccctgcacacctttgctaagccctcagaatggaacaatgacctgtgttcaacctcttggaagttccagttataaatccacatgtcaattcatctgtgacgagggatattctttgtctggaccagaaagattggattgtactcgatcgggacgctggacagactccccaccaatgtgtgaagccatcaagtgcccagaactctttgccccagagcagggcagcctggattgttctgacactcgtggagaattcaatgttggctccacctgccatttctcttgtgacaacggctttaagctggaggggcccaataatgtggaatgcacaacttctggaagatggtcagctactccaccaacctgcaaaggcatagcatcacttcctactccaggggtgcaatgtccagccctcaccactcctgggcagggaaccatgtactgtaggcatcatccgggaacctttggttttaataccacttgttactttggctgcaacgctggattcacactcataggagacagcactctcagctgcagaccttcaggacaatggacagcagtaactccagcatgcagagctgtgaaatgctcagaactacatgttaataagccaatagcgatgaactgctccaacctctggggaaacttcagttatggatcaatctgctctttccattgtctagagggccagttacttaatggctctgcacaaacagcatgccaagagaatggccactggtcaactaccgtgccaacctgccaagcaggaccattgactatccaggaagccctgacttactttggtggagcggtggcttctacgataggtctgataatgggtgggacgctcctggctttgctaagaaagcgtttcagacaaaaagatgatgggaaatgccccttgaatcctcacagccacctaggaacatatggagtttttacaaacgctgcatttgacccgagtccttaaggtttccataaacacccatgaatcaaagacatggaattaccttagattagctctggaccagcctgttggacccgctctggaccaaccctgtttcctgagtttgggattgtggtacaatctcaaattctcaacctaccaccccttcctgtcccacctcttctcttcctgtaacacaagccacagaagccaggagcaaatgtttctgcagtagtctctgtgctttgactcacctgttacttgaaataccagtgaaccaaagagactggagcatctgactcacaagaagaccagactgtggagaaataaaaatacctctttattttttgattgaaggaaggttttctccactttgttggaaagcaggtggcatctctaattggaagaaattcctgtagcatcttctggagtctccagtggttgctgttgatgaggcctcttggacctctgctctgaggcttccagagagtcctctggatggcaccagaggctgcagaaggccaagaatcaagctagaaggccacatgtcaccgtggaccttcctgccaccagtcactgtccctcaaatgacccaaagaccaatattcaaatgcgtaattaaaagaattttccccaaaaaaaaaaaaaaaa

SEQ ID NO: 2072 - DNA, 6645 bp, Homo sapiens
cgaccgacgcgaggcggtggcagaggagacccacccctgtccacatggacagtcgcaaaggcctccgctgatgcattcacgcctgggcggggtgggcggacggccgtagcggcggcggctgcagaacgagctaggggcctgggggcgcctgacggtcgcagagacctcgccgctccggcgcggcgggtgcggccattttacggcctgggacgaagggaggcgtgtttgtgtgctcgctttcattctcctttcttgggaacccacggctgggggaagtttctcaggcagcctgggtgggcggtggatggggagtcgtgggccgagaggaaccgggcccgggaagcgccgtcgtcgtcgtcgccggtcgcgttcccccggagaggcctgagaagctcgggccgcgggcctcgctgcccgccagcccgcggacaggcccgggcgcgcctggcctgcctttgtataggcccgtctgaacgtgggagcgcagcccgcctgacggctgagcccgaggcccgcaaccctgcggcgtctaccctcctccggcgcggcccctcatcccggcgagcacggcggcggtgtgggccatggattaagaaggaggcggcgtgggaggaggaagatggcggccggcaagagcggcggtagcgcaggggagattacttttctggaagctttggctagatcagagtctaagagagatggaggttttaaaaataattggagctttgatcatgaagaagaaagtgaaggagatacagataaagatgggacaaatctgctcagtgtggatgaagatgaggattctgaaacctcaaaaggaaaaaagttaaatcgtcgatctgaaattgttgctaatagctctggtgaattcatcttgaagacatatgtaagacgaaacaagtctgaaagttttaaaactttgaaaggcaacccaattggacttaacatgttgagcaacaataagaaattgagtgaaaatacgcaaaatacgtcattatgttctggaactgtagttcatggtagacgttttcatcatgctcatgcacagataccagtagtaaaaacagcagcccaaagcagtctggaccgaaaagaaaggaaagaatacccacctcatgtccaaaaagttgaaattaatcctgtaaggttaagtcggctccaaggtgttgaacgtataatgaagaaaacagaagagtccgaatcacaagtggagcctgaaattaagaggaaagtacaacagaaacgacactgtagtacctatcagcctactcctcctctatctcctgcttcaaaaaaatgtttaacccatttagaggatttgcaaagaaattgcagacaagctattactttgaatgagtctactggaccattattaagaacgtcaattcatcagaattctggaggacagaagtcacaaaacacaggattaacaaccaagaagttttatggcaacaatgtggaaaaggttccaattgatattattgtgaattgtgatgacagtaaacacacttatttacagactaatggaaaagtcattttacctggggcaaaaatacccaaaatcacaaacttgaaagaaaggaaaacaagtttgtcagacctaaatgatccaatcattttgtccagtgatgatgatgatgacaacgacagaactaacagaagagaaagcatatctcctcagcctgctgattcagcatgttcttcccctgcaccatccactggaaaagtagaagcagcgctaaatgaaaatacttgcagagcagagcgtgaactacgaagcattccagaagactcagagttaaatacagttacattgccaagaaaagcaagaatgaaagaccagtttggcaattctattatcaacacacctctgaaacgtcgtaaagtgttttctcaagaacctccagatgctttagctttaagctgccaaagttcctttgacagtgtcattttaaactgtcgaagtatacgagtaggaacactcttccggctgttaatagagcctgtaattttttgtttagattttatcaagatacagctagacgaaccagaccatgatcctgtagagattatattaaatacctctgatctaactaaatgtgaatggtgtaatgtccgaaaattacctgtagtgtttcttcaagcaattccagcagtttatcaaaagctgagcatccaactgcaaatgaataaggaggataaagtttggaatgattgtaaaggagtaaataaattaacaaatttagaagaacaatatataattttaatttttcaaaatggccttgatcctccggcaaatatggtatttgaaagtatcattaatgaaattggtataaagaataacatctccaatttttttgcgaaaattccctttgaagaagctaatggcagacttgttgcctgtacaagaacctatgaagagagcatcaaaggaagttgtgggcaaaaggaaaacaaaattaaaactgtatcatttgaatctaaaatacaacttagaagcaaacaagaatttcagttttttgatgaagaagaagaaactggagaaaaccacaccatcttcattggcccagtagaaaagttgatagtatatccaccacctccagctaagggaggcatctctgttaccaatgaggacctgcactgtctaaatgaaggagaatttttaaatgatgttattatagacttttatttgaaatacttggtgcttgaaaaactgaagaaggaagacgctgaccgaattcatatattcagttcttttttctataaacgccttaatcagagagagaggagaaatcatgaaacaactaatctgtcaatacagcaaaaacggcatgggagagtaaaaacatggacccggcacgtagatatttttgagaaggattttatttttgtaccccttaatgaagctgcacactggtttttggctgttgtttgtttccccggtttggaaaaaccaaagtatgaacctaatcctcattaccatgaaaatgctgtcatacagaaatgttcaactgtagaggacagttgtatttcttcttcagccagtgaaatggagagttgttcacaaaactcttctgccaagcctgtaattaagaagatgctaaacaaaaaacattgcatagctgtaattgattccaatcctgggcaggaagaaagtgaccctcgttataagagaaacatatgcagtgtaaaatacagtgtgaaaaaaataaatcatactgcgagtgaaaatgaagaattcaataaaggagaatctacatcccagaaagttgctgataggactaaaagtgagaatggcctacagaatgaaagtttaagttccacacatcatacagatggcttaagcaaaatcagactaaactatagcgatgaatcacctgaagctggtaaaatgcttgaagatgaactcgtcgacttctcagaagatcaggataaccaggatgatagcagtgacgatggattcctcgctgatgacaactgcagttcagaaataggacagtggcatttaaagcctactatctgtaaacaaccttgtatcctacttatggactcactccgaggcccttctcggtcaaatgttgtcaaaattttaagagagtatttagaagtggaatgggaagttaaaaaaggaagcaaaagaagtttttccaaagatgttatgaagggctctaatccaaaagtaccacagcaaaacaacttcagtgactgtggtgtatatgtattgcagtatgtagagagcttttttgagaatccaattctcagttttgaactacctatgaatttggcaaactggtttcctccaccaagaatgagaacaaaaagagaagaaatccgaaacataattctgaagctacaggaagatcagagcaaagagaaaagaaagcataaggacacttactcaacagaagcacctttaggcgaaggaacagaacaatatgtcaatagtatctcagattgaccatttctgttacttgtcatttctactttcagaaactaaatgactttcaaatttgggtatagacaataaagaactgaagtgctcactactcagtgatttggaaattttgatgcttgtataaatgtcagataattaatttccaaaggcgtatgtattaagtaaaagtctgtaaatatgttaatgaggccaatttttccagcatttataattatttttttcacttgttaggaagcttttgttatgtattttctgttaatagtacctaaaattgcaacttctaaacacaaataaaaagaaaatatttataggaggaaatgattaatttgatattctttagtgaacttgtttaattcctcagtgggtgtgacatatttcatgggaatattcaaatatctatggtaatattttgaccctttatatttgttctaaaataagtcaaaatgtgaaaataatattaaatctaagatattttgaactaagcatctttatatgcttgtgtaacaggaacaaagtaacagcctttcaattcatatactgccttgtgttcagtgaacccaagaaatgtaataaatatttgtaattttacacaaatatttaagaggaaagagtattaagagcaattcaaaaaaagtaaccttatactactaaaaaaaaaattcttgcatatattatcatcaaatgcatttttgaagacatcaaagactcaggttaaaactattttggtaagtgcagcttgaatttcaaatatcccgtgttacctttctctattacagcttaaagtatgctacaatctgtgtcatatagttaattgataagcatttttaatctgtgtaaacacaggaatttaaataggaatttactatttttttataaagcttttgctattttttcattgctcattttgttcttattattttgataaagtatcagactttttgcttgagttcttcagtgtaaattattttttacatgtaaaagtactgtattcaaccagttgcataatacagcaaaaatctttgaattcccctttaaaataactaaaatttgatggtttccatgacagatttatagcacatatagggatcttgcatgtatctgcagaaacttcattatttttcaaatgaaatggtgtatacttctttcaaatgaactttgagacttgaaacatattttagtcattttttgttaaatattgaatttttaaatacacatatatcaaaaatagttgagaataaaaagaaagcctaatcatcagcaattattttatttttaatttggccatctctgacattgcagtcaatatcttagggtattttcttgaatttaataaagtcccatgggtgggttcagggtgaatgggagtattaacaacaaccaaaaaatatctattgagacacagtagagtctcagtaagagaaatattaaaatgtaagaaaggtcaccattagtgatatcaactgtagtttgttactttgaactatatttctgattaactctttatagtaataacttagagctgttagctcagatatcttaattagctcatatgaaaaacaagtttaattttattatttactgaacatggcaaaatgcttttcaatctataataaaactgggataaaaaattgaagttgttttttttaaaacctaatagcaataagcaaaattggcatacataatttttttaatgaactatattttgtcagaatctgaaggtactgaaaaactattctaaaatgcctacttgtttttgcattaatttgtaatgcttacattttgcacccttagataatgtttgataagataaaaatataatttatcccttgtaccaactcaagtcaatcagattttaacatgaaaaatatagattaatgtatgtcagctttctagaggtagaatactcagctatttgatggcatttttcccaccccatgtgaaattttatttttggaagttatgctagtgacattgcaatatatattgaaatcttcggaggctgccaggttgagcttcaaaactagacttgagaatctttcgtgtatatgcacattcacttgataattgtgtattctatgtagtttaaagtgggatcaagccttttaaaatgtgttattagtacttagaagttgtaaaacagaacttatagaggtttgttactagacactgaaactgcatgacaagtatctggtgtcttaactaattagatagatctgttgtattggttttcttgttggatagaataacagttaatcatttttagaagagttttagattacttgccataaaatttgtatgtctcagctcttgttggtttaggagcagaagtggtgtttagtcccttcccgttaatgttgctgtgctacttcagacagctgaaaacttaatggtattatttcaagttcacataaccctaaaaaaggttttctttgtgtagtaacttgtgcttaaacttttagtcaattaaatgtaggaggttttatttgaaaacataaaatgattctctaaattacatcttgttttaagccaccaaaatgaatgcagtaatttttctttaaaaaaatgatctctgaaaactgtgagacaatgtaaaaagaataagttttaattcccccaaaatcaaaaattgtacttaaaatctcagacaattcactgaacaggaataataaagaacatattttaatataaaa

SEQ ID NO: 2073 - DNA, 2291 bp, Homo sapiens
aaataagggagtccggcggctcctctatcaggaagattgtgcatgccgtgggtctgacggcttgagtagcgctagggagaatccctgcaggtaatatttgacttttgcttcatattaatctgagtggaaaataaaagggccctcttctcctctcgcttccctgccgggcaggcgccatggcggaagcctcggcgacgggcgcctgcggagaggcgatggcagcggcggaaggctcctcgggcccggcgggcttgactctgggccggagcttctcgaactaccggcccttcgagccccaggcgttgggcctcagcccgagctggcggctgacgggcttctccggcatgaagggctgaggctgcaaggtcccgcaggaggcgctgctcaaactcctggcgggactgacgcggccggacgtgcggcccccgctgggccggggcctggtgggtggccaggaagaggcgtcccaggaagccggcctgccggcaggagcgggccccagccccacctttccagccctgggcatcgggatggactcctgcgtcatccccctgaggcacgggggcctgtcactggtgcagaccacggacttcttttaccccttggtagaagatccctacatgatggggcgcatagcttgtgccaacgtgctgagtgacctctacgccatggggattactgagtgtgacaacatgttgatgttactcagcgtcagccagagtatgagtgaggaggaacgcgaaaaggtaacgccactcatggtcaaaggctttcgggatgcggctgaggaaggagggacggcagtgaccggtgggcaaacggtggtcaacccttggattataatcggtggagttgccactgtagtatgccaaccaaatgagttcataatgccggacagcgccgtcgttggggacgtgctggtgttaaccaaaccgttaggaacccaggttgctgtcaatgcccaccaatggctggataatcctgaaagatggaataaagtaaagatggtggtctccagagaagaggtggagctggcctatcaggaagccatgttcaatatggctaccctcaacagaactgctgcaggtttaatgcacacatttaatgcccatgcggccacagatatcacaggctttggcattctaggacactcccagaaccttgcaaaacaacaaagaaatgaagtgtcctttgttattcataatctgccaataattgccaagatggctgccgtcagcaaggccagtggacggtttgggcttcttcaaggaacctcagctgaaacctctgggggattactgatttgtctgccaagagaacaggcggctcgcttttgttctgaaatcaaatcctccaagtacggagagggtcaccaagcgtggatcgttggcattgtggaaaagggaaaccgaacggcccggatcattgacaagccgcgagttattgaagtcctgcctcgtggggccacagctgctgttcttgctcctgacagttcaaatgcctcctctgagcctagctcgtgagatgaaagaacagaagttgtttggaccttagagccattgtccacaatcacggatggttctcaagagttgattgtaagaaatttccaaagaaggctgcctgcatagtggttccggctgccctttctaggtgattggaatcagcccatctaaagcagtctttatatgcattccgaggccagagtaacattttgaactttggggggatatttgttcatcacttgggtagaagaggagcaaaaatacctctgttttctcttgccaaagtaagatgaagctattccaggttgagggatttttctttgcacggggttgattaatttctgcacagggagtgagattattaaagtaacacacacacaaagtaaattgcaaaatgaaaaaaattagaagcaaatgagttttggaccaatattgttgataaatctaaattgttaagagagatcttataatgcaacatcaaattctttattcaattttactgaagtactggctctttcctgctctggacaagaattgagcaacttgtctgatgactgggaaaggaggacctgcaaccatctgacttggtctctgttaatgacgtctctccctctaaaccccattaaggactgggagaggcagagcaagcctcagagcccaggcctcagtggtcattaagatgttaagtcttttgcggcagattcctggtgatttgatcaataaagagtaatttcttgctaaataaataaaagaaaccttgttgaaaaactaaaaaaaaaaaaaaaaaaa

SEQ ID NO: 2074 - DNA, 2611 bp, Homo sapiens
aggaacgactgtgctacgttgccagaaggggcgggacctgcaacgtccgacagaacgaggggacgtaacggaggcaggttggagccgctgccgtcgccatgacccgcggtaaccagcgtgagctcgcccgccagaagaatatgaaaaagcagagcgactcggttaagggaaagcgccgagatgacgggctttctgctgccgcccgcaagcagagggactcggagatcatgcagcagaagcagaaaaaggcaaacgagaagaaggaggaacccaagtagctttgtggcttcgtgtccaaccctcttgcccttcgcctgtgtgcctggagccagtcccaccacgctcgcgtttcctcctgtagtgctcacaggtcccagcaccgatggcattccctttgccctgagtctgcagcgggtcccttttgtgcttccttcccctcaggtagcctctctccccctgggccactcccgggggtgagggggttaccccttcccagtgttttttattcctgtggggctcaccccaaagtattaaaagtagctttgtaattccttgagcgcctggtttgactggggacttggggggatggggttggaagaatgactgccctttcccaccaaaaaagggagaactctttagattcagattgtgggtatgtagacttaataagtgaaacatcacagaagaagcctttattatacaatgacaaccaaacaagtactccggatatgcagtagaggaatcctctaagaaccatagagacttcttttctgtgatttttgttccccacccttgaacaccatctctaggatggagttggcctaagagtgaatgctgcaagatctgtgtttatgcctcttttcctcattcttcctcagtttgttcgtctgcttgaaagttggccaaaaaatcctgctgctcaccgacttcccgtggtcagctgctgtcaagcgttcactttctcttctgtcattcctcatggaatgagggtggttttgtcttcccgcttcccttgacctcaaaatcaggattaaaacctggggtagcctctgtgctcctttcttctatgccctggtttgttctgtggttctgggcttcttatatccgtgtgcccagggctgaactccttattttcctttctccaagggcagagccgagtcttcagtccctgttggtctttccccacccccacttccagcccaagagccaggaaagggctggtgccacactgtctgctgggatcagcggtggttctttgagctgctgatttgggtgttaggctcttgagctgggatgcagatgtaacagtagctccagtgagtcagacactctgcccagcacattagactgtgtttgaccacttcttccagttcatagtattgacttcagcccaaacggagataactccctgtgtgtccttgaggtattgagctgggctggacagctccccttgagccaactctaggagtacaatgtcaggggaaccccagtttgtgaaaaggacttagactggaggatatttgttatctggggatatgatgcggtggcggcggcgcctcaagataaggggctggggtttctgggtggggggccaacagagtggtgccagtaacagccccagatagaggagtacgcaggcccagcatgaggcaaccttgacccagaaggtggcccagctacccttgatgaaggtcttttccagttctgctccctcatagctgtgtaaccaaaggctctggttagagaatatgaagggccttagcttttagacctgttctacctcctcaccaaatataatggcagacccatgtgtgtctggaatggccttgaattgctctttccttaaaatagctagctcttcaggagagtatctaaggcccactccatcttacctgaaccagttggtaagggtaaccatgacatagagtgaggcaaggaagaagacgaagtggaaggcagaatagttgtaggaaagatgctggacttggactggaggagctggaggggtttcttggtcagctggcctcgcagccccacccctttgccctggagagaggaaatggctgctgggagcagagctgctgaaacacctcttcccctctcccccaactacctttgttaaggctcttgagggttcttatggcactccacagagatctaccacttcttatggttcctcacttggcactcacctttgtctgcctccactgtttcagggcagcagaaacacagtgagggcttctgcaaaacagaacgcaggttttggaatggtcttaaaagatgtgagggtgttaatctaggaaacttcccccgtgaaaagattggtctagtattaaaaagtggaggcacacctgggttcaaattctagctccagcatataagtggctgtgcagactttggtaagatgtttaatcttttgtgcctcgatttctccatttgtaaaatggagcaaatacctacctcacagggttgttgtgagggttaaattaaatgagattatgtaaaagtatctagcacagttgcctagcacattgtgggtactcaataaaaggtaacagcagctataatctgagcattctgggtagaggttggtaaaaaaaaaaaaaaaaaa

SEQ ID NO: 2075 - DNA, 1349 bp, Homo sapiens
agaaggcctcgcacaaaacactgtacaaacccgaaaggaagtctgagagacgaaccgccttcctccctgaagcttctagaactggagcagaaagaaggtgtggcccagggccagccccgcctcctccccgggcggaagctgtgtcagttgccggaagtcggcgtgaggtggggcttatgcggcggcgtggtgaaatagatatggcgaccgagggggatgtggagctggagttggagactgagaccagtggaccagagcggcctccggagaagccacggaaacatgacagcggtgcggcggacttggagcgggtcaccgactatgcagaggagaaggagatccagagttccaatctggagacggccatgtctgtgattggagacagaaggtcccgggagcagaaagccaaacaggagcgggagaaagaactggcaaaagtcactatcaagaaggaagatctggagctaataatgactgagatggagatatctcgagcagcagcagaacgcagtttgcgggaacacatgggcaacgtggtagaggcgcttattgccctaaccaactgatgcgtgctttctcaaatatacctactggattaatttatggcaataaaatttttttttgtctttttcagttttatcatcttgggtcaagtagagtgtatactatatcctatgttgtggagaatttatatgttggagactaactgaatttaagtgacccattaaaatctagcacacctgtatgaaaaatcagtgtagaagaatacctcatgtgcagatgctaggtggcaggccagtctcattcatctgactagctctcaacagtattcaaggtacatctggagtctcagcagagttactgtactcaaatggcatgtgtctccaagacagcttatgaatatctaaaaggccagctacctgcctaggagccactatatatatagatagatgtaggttatgaacccagttcataggccaccttgagttagaattttggtacctacaacatgcttgattttgagtgattaaaaaaaaataatttggctgggtgctgtggctcacgcctctaatcccagcactttgggaggtcgaggcaggtagatcacgaggtcaggaattcaagaccagcctggccaacatgtgaaaccccgtctccactgaaaatagaaaaattagctgggcatggtggtgggcgcctataatcccagctattctggaggctgaggcaggaatcgcttgaaattggaaagcagaggttgcagtgagctgagatcacactactgtactactgtactccagcctgggggaaagagtgaaactccatctcaaaaaaaaaaaaaaaaaaaa

SEQ ID NO: 2076 - DNA, 2488 bp, Homo sapiens
cttcctctttcactccgcgctcacggcggcggccaaagcggcggcgacggcggcgcgagaacgacccggcggccagttctcttcctcctgcgcacctgccccgctcggtcagtcagtcggcggccggcgcccggcttgtgctcagacctcgcgcttgcggcgcccaggcccagcggccgtagctagcgtctggcctgagaacctcggcgctccggcggcgcgggcaccacgagccgagcctcgcagcggctccagaggaggcaggcgagtgagcgagtccgaggggtggccggggcaggtggtggcgccgcgaagatggtcgccaagcaaaggatccgtatggccaacgagaagcacagcaagaacatcacccagcgcggcaacgtcgccaagacctcgagaaatgcccccgaagagaaggcgtctgtaggaccctggttattggctctcttcatttttgttgtctgtggttctgcaattttccagattattcaaagtatcaggatgggcatgtgaagtgactgaccttaagatgtttccattctcctgtgaattttaacttgaactcattcctgatgtttgataccctggttgaaaacaattcagtaaagcatcctgcctcagaatgactttcctatcatgcttcatgtgtcattccaaggtttcttcatgagtcattccaagttttctagtccataccacagtgccttgcaaaaaacaccacatgaataaagcaataaaatttgattgttaagatacagtagtggaccctacttattcagtcaattaagagtaagtttttttatgtggttattaaaacagtatgaacaattagtctaactctgcatagacagggtctagattttgttaacccaaatgtataactgcagttagcttaaattacaatttgaagtcttgtggtttttatatagctaggcactttattactcttttgaactgaaagcacactcccttataggttcatgtaactgtcctgtaataaggtgcttataaatggaacaactacacagcctagttttgccacaacctttagcatctaaaaagttttaaaagcttctaaatgtctaatataaagggagatgcttatagccacaacatctattttaccaatattgtttccattacactaccttggattttgcatgagtgagtatagtaacccaagatgccataaaaaaaaacttgatcgttttctgacttaattagttactgtggtttcactaaaagctaccgtggtggagtgaagtcagtcagggaaggtttgtttatgttacatttatttcaccagaactattttaatatatcaaaggggtttactatgccaaacaaaattctagggaaaaatactgctaaaaatggatgcctcatcagaacatgctgttgagtccaatgtgccataagacattttagcatgttaaatagcacttttaatagcaaaaaaaggcacatcaactgcgaagttatccttagtttgcaaatgctttttctagattaatgatttttcaatcattagggtactagacacatcagcctaaagtggcatctggaattgaatggatttactgataatgatcagtctttagtcttccctttgttatatgactttataggttatgattgatcaaatttacgttttactaatggtaagggtgagggtcatagggcaggttttgggttttctagtactgttgaaaactgcaagtattggctatttgtatacttagccataacttggtgaaaaaaaacctgagcagtgtctatgtattaatgcgttggaaagaaagctgcttgtgtttgctttgttaattgcctcaggatatttcttttaaaataagctgttttaagaggaacagaagggaaatctgctacctagtctatacacagcgtgaacctcacagggggcttctgataccctcaaacatggagaacagtaagggagcagagtggttaaggactttcaggaacttaactattctggaataaggaatgaatcaactgaccttgggccagcaggtttttaactaaattgttacttgcctttctcacccagttaatcagtctctgtacttgtttccctttttgaaacaagtgtcttggttaactaattctgttttatggttgtgctaaattcatagcaggtgccttattctttgcttttagtcaaaccattccatatcagaattttccttggtttactatagatatttggctttaagttgttgtttgtgttttttaatgtacaatgttctgataaatttgactgttaaattgctatagctagcaatcattttacatatgtaaaaaattgcattccctttgtatttcatgtgtaattcaccaattaagtgcagtttatattcaggttggattatgcatgtttaggtaaacgaaagctgtgtcttacttgatttattctttaaaaataaagttccctgaatatttgaaaaaaaaaaaaaaaaaaaaaaaa

SEQ ID NO: 2077 - DNA, 4121 bp, Homo sapiens
ctgcgcctcgggggtcggcgtccaggctcggagcgcggcacggagacggcggcagcgctggactaggtggcaggccctgcatcatggaaactctttctaatgcaagtggtacttttgccatacgccttttaaagatactgtgtcaagataacccttcgcacaacgtgttctgttctcctgtgagcatctcctctgccctggccatggttctcctaggggcaaagggaaacaccgcaacccagatggcccaggcactgtctttaaacacagaggaagacattcatcgggctttccagtcgcttctcactgaagtgaacaaggctggcacacagtacctgctgagaacggccaacaggctctttggagagaaaacttgtcagttcctctcaacgtttaaggaatcctgtcttcaattctaccatgctgagctgaaggagctttcctttatcagagctgcagaagagtccaggaaacacatcaacacctgggtctcaaaaaagaccgaaggtaaaattgaagagttgttgccgggtagctcaattgatgcagaaaccaggctggttcttgtcaatgccatctacttcaaaggaaagtggaatgaaccgtttgacgaaacatacacaagggaaatgccctttaaaataaaccaggaggagcaaaggccagtgcagatgatgtatcaggaggccacgtttaagctcgcccacgtgggcgaggtgcgcgcgcagctgctggagctgccctacgccaggaaggagctgagcctgctggtgctgctgcctgacgacggcgtggagctcagcacggtggaaaaaagtctcacttttgagaaactcacagcctggaccaagccagactgtatgaagagtactgaggttgaagttctccttccaaaatttaaactacaagaggattatgacatggaatctgtgcttcggcatttgggaattgttgatgccttccaacagggcaaggctgacttgtcggcaatgtcagcggagagagacctgtgtctgtccaagttcgtgcacaagagttttgtggaggtgaatgaagaaggcaccgaggcagcggcagcgtcgagctgctttgtagttgcagagtgctgcatggaatctggccccaggttctgtgctgaccaccctttccttttcttcatcaggcacaacagagccaacagcattctgttctgtggcaggttctcatcgccataaagggtgcacttaccgtgcactcggccatttccctcttcctgtgtccccagatccccactacagctccaagaggatgggcctagaaagccaagtgcaaagatgagggcagattccttacctgtctgccctcatgatttgccagcatgaattcatgatgctccacactcgcttatgctacttaatcagaatcttgagaaaatagaccataatgattccctgttgtattaaaattgcagtccaaatcccataggatggcaagcaaagttcttctagaattccacatgcaattcactctggcgaccctgtgctttcctgacactgcgaatacattccttaacccgctgcctcagtggtaataaatggtgctagatattgctactattttatagatttcctggtgcttagccttataaaaaaggttgtaaaatgtacatttatattttatcttttttttttttttttttctgagacgcagtctggctctctgtcgcccaggctggagtgcagtggctcgatctctgctcactgcaagctccgcctcccgggttcacgccattctcctgcctcagcctcccgagtagctgggactacaggcgcccgccaccacgcccggctaattttttgtatttttagtagagacggggtttcaccgtgttagccaggatggtgtcgatctcctgacctcgtgatccacccgcctcggcctcccaaagtgctgggattacaggcttgagccaccgcgcccggctatattttatcttttatctttttctttgacatttaccaatcaccaagcatgcaccaaacactgctttaggcactggggacacaaaggggacagagccatcctcctttgacacctggtcttcagttctgtgcccaacgtatatagttttgacaatgaccaggttggactgtttaatgtctttcaacttaccacgtaatcctcttgtagggatcacatctttctttatgatattgtatttctctacctctaacagtaaaaattccattcaacccttaaagctcacttcaaattcttctttgagaagtttttcctttctccgcaaccagatgtacatatttgaactctctttgtacttggagggcacttctttcgtggtagttcttttatttttattaatctctgtatccttagatagtcctccaacaaccaaaggttgggactctgtcttacatatctgggtgcccctcatagtgcagtaataagtaagttgattatatacgagctatgtaacttatattttttaatggttggatatcactgagtttttttttttaagaatttttttattgaggtaaacttcacataacataaaattaactattttaaagtgagaagttcagtgccacttagtattgttaacaatgttgcataaccaccacctttatttaaagttccaaaaaaaatgttctcctctaaaaggaaaccccatcccattaagcagatactctccattccttccttcctccagcccccagcaaccaccaatctgctttctgtctctatggttttatctattcttgctattttatataaatcgaattgtatgagaccttttgtgtctggcttctttcacttagtacaagtttttgagatttatttacatagtagcatgtatcaacacttcatttttatggccaaataaaattgtattatgtgtttatagcacaatttatttatccactcattcattgatggactttgggttgtttctgacttttggctattgggaatagtgctgctatgaatgtttgtgtacctgtatttgtttgaatgcctattttgcattctcttgggtatatatctaggagtggaactgctgggtcatatgttaattctatgtttagctttttgaggaacagacaaactgttttccacagcagttgaaccattccacattcccaccagcaatgtatgagaattccaatttctgtccacttcctcaccaacacttattattttccttttcctttttttaaaaaaaataagttatggccatcttagtgggtgtgaagtggtatctcattgtgttttttatttgcatttcctatgtaatgagctagaaactaaagtacaaactagatgggacatccagtccctttgatagataatgctgagtaaaaaatgagatgaaagacatttgtttgtttttagaacatgagtgacagtttgttaaaaagctttagaggaggaatgaaaacaaagtgaagtacacttagaaaagggccaagtggacatcttggatgtcaagtgcctagttcagtatcttttttttttttttttttttttttgagacagtgcctcactctgtcacccaggctggagtgtagtggcatgatctgggctcactgcaacctcctcctcctggattcaagcaattctcttgcttcagcctcccaagtagctgagactacaagcacccaccaccacacccggctaattttgtatttttcagtagagacggggtttcgccacattggccgtgttggtcttgaactcctggcctcaagcaatccgcctacctcagcctcccaaagtgctaggattacaggcataagccactgagcccagccctagttcagtatcttttatgtaaattataaacatctgcaacattatgtatcatatgcagatacttattgcatttcttttattagtggtgaaagtgttctatgcatttattggctcttgaatttcctcatctatgaattgtcattcacacacctacttttctgcttcgtttttacatatgtctttgcctattaaagatattatccctctgttttatattttctctcattcttgtattgccttttaaattttgttatgatgtttcattaataaacagtgttttgttttcctctataaaaaaaaaaaaaaaa

SEQ ID NO: 2078 - DNA, 2208 bp, Homo sapiens
tctttggctttttttggcggagctggggcgccctccggaagcgtttccaactttccagaagtttctcgggacgggcaggagggggtggggactgccatatatagatcccgggagcaggggagcgggctaagagtagaatcgtgtcgcggctcgagagcgagagtcacgtcccggcgctagcccagcccgacccaggcccaccgtggtgcacgcaaaccacttcctggccatgcgctccctcctgcttctcagcgccttctgcctcctggaggcggccctggccgccgaggtgaagaaacctgcagccgcagcagctcctggcactgcggagaagttgagccccaaggcggccacgcttgccgagcgcagcgccggcctggccttcagcttgtaccaggccatggccaaggaccaggcagtggagaacatcctggtgtcacccgtggtggtggcctcgtcgctagggctcgtgtcgctgggcggcaaggcgaccacggcgtcgcaggccaaggcagtgctgagcgccgagcagctgcgcgacgaggaggtgcacgccggcctgggcgagctgctgcgctcactcagcaactccacggcgcgcaacgtgacctggaagctgggcagccgactgtacggacccagctcagtgagcttcgctgatgacttcgtgcgcagcagcaagcagcactacaactgcgagcactccaagatcaacttccgcgacaagcgcagcgcgctgcagtccatcaacgagtgggccgcgcagaccaccgacggcaagctgcccgaggtcaccaaggacgtggagcgcacggacggcgccctgctagtcaacgccatgttcttcaagccacactgggatgagaaattccaccacaagatggtggacaaccgtggcttcatggtgactcggtcctataccgtgggtgtcatgatgatgcaccggacaggcctctacaactactacgacgacgagaaggaaaagctgcaaatcgtggagatgcccctggcccacaagctctccagcctcatcatcctcatgccccatcacgtggagcctctcgagcgccttgaaaagctgctaaccaaagagcagctgaagatctggatggggaagatgcagaagaaggctgttgccatctccttgcccaagggtgtggtggaggtgacccatgacctgcagaaacacctggctgggctgggcctgactgaggccattgacaagaacaaggccgacttgtcacgcatgtcaggcaagaaggacctgtacctggccagcgtgttccacgccaccgcctttgagttggacacagatggcaacccctttgaccaggacatctacgggcgcgaggagctgcgcagccccaagctgttctacgccgaccaccccttcatcttcctagtgcgggacacccaaagcggctccctgctattcattgggcgcctggtccggcctaagggtgacaagatgcgagacgagttatagggcctcagggtgcacacaggatggcaggaggcatccaaaggctcctgagacacatgggtgctattggggttgggggggaggtgaggtaccagccttggatactccatggggtgggggtggaaaaacagaccggggttcccgtgtgcctgagcggaccttcccagctagaattcactccacttggacatgggccccagataccatgatgctgagcccggaaactccacatcctgtgggacctgggccatagtcattctgcctgccctgaaagtcccagatcaagcctgcctcaatcagtattcatatttatagccaggtaccttctcacctgtgagaccaaattgagctaggggggtcagccagccctcttctgacactaaaacacctcagctgcctccccagctctatcccaacctctcccaactataaaactaggtgctgcagcccctgggaccaggcacccccagaatgacctggccgcagtgaggcggattgagaaggagctcccaggaggggcttctgggcagactctggtcaagaagcatcgtgtctggcgttgtggggatgaactttttgttttgtttcttccttttttagttcttcaaagatagggagggaagggggaacatgagcctttgttgctatcaatccaagaacttatttgtacattttttttttcaataaaacttttccaatgacattttgttggagcgtggaaaaaa

SEQ ID NO: 2079 - DNA, 3234 bp, Homo sapiens
ggctagcgtcagcgccagccagaattaaggaagttcactggagtaaaatggaggcctcagtaatattacccattctgaagaaaaaactagccttcctttcaggaggaaaggacagacggagtggcctcattttgacaattccattatgcctcgaacagacaaatatggatgagctgagtgtcaccttagactacctactcagcattccaagtgagaagtgtaaggctagaggatttaccgtgattgtggatggcagaaaatcacagtggaatgtggtgaaaacagtagtcgtaatgctacagaatgttgttccagctgaggtgtcccttgtttgtgtggtaaagccagatgaattctgggataagaaagtaacgcatttttgtttttggaaggagaaggatagacttggctttgaggttattttagtgtccgccaacaaattgactcgttatatagaaccatgccaattaacagaagattttggtgggagtctcacctatgatcacatggactggttaaataagaggctggtttttgagaagtttacaaaggaatctacatcattattagatgaacttgctttgattaacaatggaagtgataaaggaaatcagcaagagaaagaaaggtctgtggatttaaactttcttccatcggttgatcctgaaacagttcttcagacagggcatgaattgttgtccgaattacagcagcgtcgatttaatggctcagacggaggggtttcatggtctcctatggatgatgaacttcttgcacagccacaggttatgaaattattagattcactccgagagcaatatacccgctaccaggaagtttgtaggcaacgtagcaagcgcacacagttagaagagattcaacagaaggtaatgcaggtggtgaactggctagaagggcctggatcagaacaactaagagcccagtggggcattggagactccattagggcctcccaggccctacagcagaaacacgaagagattgagagccagcacagtgaatggtttgcagtgtatgtggaacttaatcagcaaattgcagcactcttgaatgctggcgatgaggaagatcttgtggaactaaagtcactgcagcaacaacttagtgatgtttgttatcgacaggccagtcagctggaatttaggcaaaatctcttacaagcagctcttgaatttcatggtgttgcccaagatttgtctcagcagttggatggcttattagggatgttgtgcgtagatgtagcaccagctgatggagcatcgattcagcaaactttaaaactgcttgaagagaagctgaaaagtgttgatgtgggattgcaaggtttgcgtgaaaaaggtcaaggtctcctggatcagatctccaatcaggcatcctgggcctatggaaaggatgtaaccattgaaaataaagaaaatgtggaccacatacaaggagtgatggaagatatgcagcttagaaaacaaagatgtgaagacatggtagatgtgcgaaggttaaagatgcttcagatggtgcagttgtttaaatgtgaagaagatgctgcccacgcagtagaatggctaagtgaacttctggatgctctgcttaagactcacatcagattgggcgatgatgctcaagaaacgaaagttttgctggaaaagcatagaaaatttgttgatgttgcacagagcacttatgactatggcaggcagttgctacaggccacagttgtgttatgccaatctttgcgctgcacttctcggtcatctggggatacacttcctcgactgaacagagtatggaaacaatttacaatagcatctgaagagagagtacatagattggaaatggctattgcatttcactcaaatgctgaaaagattttgcaggactgtccagaagagcctgaagctattaatgatgaggagcaatttgatgaaattgaagcagttgggaaatcacttttggatagattaactgttccagtagtttatcctgatggaaccgaacaatattttgggagtccaagtgacatggcttctactgcagaaaacatcagagacaggatgaaactagttaatctcaaaaggcagcagctgagacatcctgaaatggtgaccacagagagctaatagctaccagctacctacagatttgcagttcataatcccgcatgttgtcaacatactacagcattagccaccacaccttaagatgcatttcacagccaaaataagtctcatttctttttatgacacatttctctttacatgttaacaccttactactaccaaggcataattacttaacatgcttcgaggctgtagattccaagtatcttaaaagaaggaactataaacattgcactgaaaacttgctttaaagctttacctgacctgtcagtttgtagacaaacaactgataataagctttgaatggtgctaataagagtaggaattctctctattaaaaagaaaaaaaaaaagttgcccttcctccacaggtgatttagtaaatttagacagtagttaaactcttgttagtagacagtggtgtcctcaaaattttactttgtaattcttcagaattgattatttttattgtgtcaatacagagaaagcctttcagatctttgatatatcatagtcattaaaagaccttttcctatttgtattgataatgtattaaaagttgtttgtgcttaataaaagacttctttaaacatcttatttaatttagtagttacatcctatttccaaacatgagtgccttatttaaaagggcattcttaggactgtgaggatggtttaatatttgttttttcatggtggttgcatgtattttagacaggaaatacatatgtaagcatgtgtatataataaataagcatgttttatcatgaaaaattattgtgaacaatttagatctttaagaacttattaataatggaatactatttctaatttttctctttttcaacttgaaaaatattctcaaaattattaactaccctgaagatactttgtctttaggggaggagggctgaggaagaaggcatacataattacttcagtgtaatcctttatatcagagtaatctttcaggaactaaaatagcaattgttaataaaatttagtttctcattatagtctaaaagcaaaataaattctgaagtagtccaataacagaactgtatgacccctttagaaataaaatttatcatgaaat

SEQ ID NO: 2080 - DNA, 7012 bp, Homo sapiens
ggagaaagttgcagcagcggcagcggccaaggcggcacaccggagcctccgaggcgaggggcaagtgggcgaagggaggggggacgacggctgctgccgcagcagctgaaggccaaggaattgaaagggctgtagggggaggcagtgcgagccagccccgactgctcctcctcttcctcctcctcctccaaactcgcgagccccagagctcgctcagccgccgggagcacccagagggacgggaggcagccgcgcagccccgagctgggcagtgtccccagccgccatggatagcgacgacgagatggtggaggaggcggtggaagggcacctggacgatgacggattaccgcacgggttctgcacagtcacctactcctccacagacagatttgaggggaactttgttcacggagaaaagaacggacgggggaagttcttcttctttgatggcagcaccctggaggggtattatgtggatgatgccttgcagggccagggagtttacacttacgaagatgggggagttctccagggcacgtatgtagacggagagctgaacggtccagcccaggaatatgacacagatgggagactgatcttcaaggggcagtataaagataacattcgtcatggagtgtgctggatatattacccagatggaggaagccttgtaggagaagtaaatgaagatggggagatgactggagagaagatagcctatgtgtaccctgatgagaggaccgcactttatgggaaatttattgatggagagatgatagaaggcaaactggctacccttatgtccactgaagaagggaggcctcactttgaactgatgcctggaaattcagtgtaccactttgataagtcgacttcatcttgcatttctaccaatgctcttcttccagatccttatgaatcagaaagggtttatgttgctgaatctcttatttccagtgctggagaaggacttttttcaaaggtagctgtgggacctaatactgttatgtctttttataatggagttcgaattacacaccaagaggttgacagcagggactgggcccttaatgggaacaccctctcccttgatgaagaaacggtcattgatgtgcctgagccctataaccacgtatccaagtactgtgcctccttgggacacaaggcaaatcactccttcactccaaactgcatctacgatatgtttgtccacccccgttttgggcccatcaaatgcatccgcaccctgagagcagtggaggccgatgaagagctcaccgttgcctatggctatgaccacagcccccccgggaagagtgggcctgaagcccctgagtggtaccaggtggagctgaaggccttccaggccacccagcaaaagtgaaaggcctggctttggggttcagagacctggaatagaaacttggatctatgcactacgtttatctgacaatgggacaaccagggactgctcatgctgtgacgtcacatcctctcaccatgcgttagcaacgactttctcgcatactaactaggtttgactgtattactcataccagatttaaaattagctagccttgcaacaacgtcctactgagaggtattgtcgagcatttgacataagacagcgtgatgttctttggtggttcaagtctaaatctgtaccacattcggagatgccaaatgattagactgaaacagggaaacggggtttttcagtcatttttagtcagtggtttttccatagtgcttttttcctatggccagtgcaaattgtgttagcacacttgcatatgtgccgtattaagggttgacaattactacatctttattctctaaatgtagtataatttgccttttaacctttgatctgtatcttgcaatagaatggctttggtttttttcttagtaaataggagcccacttctaaagtcatttcacccctcagccctattctctttcttagataccctttacaagagaaaacttccaaatggatttttgcatcaatagcagtgtgtaggtctctctggttctttctatatcatcattttattattatgtcctaatataaagtactggctcatagggccagggtattattatagaatattattctcgcatgtaaacaaagatatctttgctttaagatgtgagaagaaatgaatttactttgtttgcattaagttatggaagagttgtaatatatactttaagaaagaagagaagaaaactagtatctctaagcggtaactatggcaattttgcaatattttcagtagtgctagtaattttttcctccttgagtacacattaaatgtacataacatagcgcggtcaggcttgtggcacagtgcattgaattcaaaagtcaaacagcaaatttgaattctaacagaattcaaaaaaaaatttttttagtcagtactactaaggcagacacactgattactaggtacaaatcaaaccttgatgctaaaactcttcatcattgtaatttcaaagcacttacctgcttcaaaacattgtaaactaagactgaacacctgtatagtttaaaagcaacactatcaatagcatttcagccattttgccagccatgtgtaatcacaactgcagaaataaggagaaaacccctgtttttttagtttagctaattagatctgtaacatcactgggattgctctgaatgaatcctgagagttttgttttttataagcaccctcaccacatgccatagctttgtctcttttagacacctcgatgcagcggctggaaggactggagagcagctgttgtgctgatctgtagctgtcagctgtgattcctgtcacctgagtcagtttggtctggaaagcgaaggccttccaagctgtagcagatagtgagctccagctgatgagagaaggcttcagtggaagaagagtgaggacataggcagaaggaagtttgctatttcttgtcagttgcacattgctttatgaagactacaacaaaagtgcttaatcccaggctgctcatgactttcatttcaggtggcccttgggcacattgacagagttgcccttcccttctttgcaacaccaggcttcctagagcacccggttgcatgctttgcagctaggtggcagtggtttcagggagatccagttggatccctgcttgaaagcttaagccaatggttcacccatgagaggaagttgtcagtgcttccaggaagattgcccaccaaaggaactgaatagtttttagatttaaaggcaccaggatagggtcactcttactctgtagaaagagaccgttctatacactgtgacggatgggccagggcctctggacttgcattctgataggtgctttaatttaaatgtgcccaaagggagtgactgtcttcaggagaaagatggcttgcattaacctcgatcaagtgggttgtgcagccaggtcagggaatgcggtcagggagaggatagtgctggtcatgcccccgatgcagctatgctctgaatgatttcattcctgagagtgatagcattctggtcctggctgcagtggggtacaatttacgtcctaagtgggggctactctaattatcccattcaaatggaatttttttcaaaattggatagaaggaattgaagagttgtaagtagtgattagtctgctaatcagttcttcagatgagatattgaatggtaacactctgagcttaaaactcagcagtgtgtctgtgacctccacgcaaatcagaggaagcaatgcatccacgctgagcctcaccatgtcttcctcccaactctcttcatactctctgtgtcttccagctcttctttctctggccggctctctttcctcttctctctgcatatgtgagaacgcctgggcatcctgggtaacagcagccccagctgccctctcctgttccctgttccaagtcccctgcactgacctttcttgagtctctctggctctgtgcatgtctttgggactctgctcatctggcttttcctctgtgtgtgcctctctgtttgcttatgtctctggctctgtcttccccacccctcccctcacacacacacatactcccaaatgtaaggctctgtggcaggttggaatcggagtaaggcttgagattcactgagttctgtaggtagggaaagaagtcaagggagtggaggttctataaggaattaacagctgaggacggaagggtttgtttcccgtttgaacctaaacgcaagtggaaaagaatactcagaatgtatttttctactttacatctgctggggaaggaaatgtgtcaggaagccgctgcatctggtcatttcatcgcatcagaatcacagcagacgtggaagattccatgtggtggggaataaagaaataactttatgctctcctgaaaaacagcgggagcctatgtgtgtgtgcgacactgtaatctcaaggagattcactcagagctgtctcagtccaactcctgcatgaccagatcttcccttagcatcttttctgtgatgaaatattatcttgtgttagagttaggaataggaactaacctgtaggagcatgtccccaaatggacatttgaatggactaacaaaaacaactggaaagactgaatttccgacacaaaggaatgatgggatcaaaaagaaagcagtgaggagttcttgagtcttgtagtacctattcttattttaacttgcttcatccttgatctacctgagacactaagaaggaaattagttttccaagagctctttgaacctgtctaggactgtagttaaacctatttgccctatgggggttcttcacactcgaaaaactatttccttatcaccaacgacccacccagaaaggccaatgaggccaaatgtaacaatttttaacatttaaatataactattaaaattgcattaattgtgaacagtgaattaaagggttgtcttctccaggagacagtatgtggcacttttcgtaaatttcatttaatatataaaaatttaaatcactcactgcaacatgcatttaaaatcttccaagaaggtagaggtatcattttctgttttgctttgttttaaaacagttgcctcaagcttctgtcttaagagtagtgacttagaatccagatatcttttgttttagaaaaacaagcaaaactatgttgcaagactgacagttgtaatgtttatttgccacagatcaaaggttcacaaagtatatcaaatttacatctacttggggtaccttgatagattattattgtttttcttttatctttcccttcaggaatttggaaactcgttgtcactttttttaattttaaaaatactaaattgtaatagttttcttttgccaaatgtgtgcgtacatattcaaagcaatgaaactatttcaagccatacaaccacaggggtgggaacccttttcacaaattttaatgtgtttgtatgtaaatagatgtttgtatgaaatattttcatgatagaatgaatatatttaaatgaagttgaattattccagtgctacttaaacacattacaaaaattttggtgagaattatctgagtctattgagatgtaatgcagatcaattttgatttttaaaaatcaaaagcctacaataactctgactctcagcaacttcctcggcgttgttgcacctgacgtggagagagctcgtaggcttccccagtgcctcagccgcttcctggtggaagttaggtgctaatggaggtgtgttcaccttttagtgatatcactgcaggcctttgaggggcctgagagtgaatcagaggcattagagacaccggtgcagttatctggagcacaatttctttgcagggcagcagaatcagaagccagacttggccatgtgaacctcgaaactcggtttcccggccgccatcaaccgccacccttactgcctagtcacacacgtcagggaggctgccctcagtggagttggggttgagaccccagggtgggacttcacagttttgccagcaatctctaccttctgacttctgcctcgcagagaggaaggagaggggagcatctggcaaggggcccatttctcagcacagtacatttcctgtctcagctctggaagactatgcacccaagcaccaaacttccaaccagagagagagacgtcctccgataacaaaaatccttgcttcctctgtctgtgactttacacacagttgttcaaagttgttaaatgtcaagagtcaatcacatccctaggacatacctcccaactctcctgactcttatgttattgaaaaaacaaacaaacaaaaactcctttatgatgatattcaacttgagtggggttttttttccactttggtcctggatataatgaaatgatacatattaggataaattttcactgtgtatagtagcaatacgaacacacatgccaatgtatcaacatatctacttggttacattttggtttatgataattaaccttgattcatgtattgggaagctacagggactacgtaatacctgcttatcacataggaaaattatgtccatgattctgagctcccttcttcaaaagtttcctcctgggtgttctatgttctctctttatcctgaaatacatttattaggttgtgaggtatgttgaagaagtagaagccaggggtatgctttcagcatttattgcaaccaaaagttaaccccatcacggttaacgagcatctttggtctcttgtggaatttgaactaaaactatgagccttattcaatatctataattctatgatttttttaaattatgggaaattaatgaaagatgtttacatgaataatgtttgcccttactgtgttatgaatgagttttttgtagtgtgtctgggtgcatgatgcaagagagtaggaaaaatgtttctgaaacaaaacttgacaaatatttgtaatgaaagtaaatttaaagattgctataattgcgctatagaaacaatgcaagtattaaacaaaatatacaatca

SEQ ID NO: 2081 - DNA, 5744 bp, Homo sapiens
agcgcatggagccagaggaggaggatgaactaggctcagggcgggatgtggattccaactccaacgcggacagtgagaaatgggtggcaggagatggtttggaagaacaggaattttctatcaaggaggcaaacttcacagagggaagtctgaagctaaagattcagaccacaaagcgggctaagaaacccccaaagaatttggagaactatatatgtccacctgagatcaagatcaccatcaagcagtctggggaccagaaggtgtcccgtgctggaaaaaatagcaaagccacgaaggaggaagaaagaagccactccaaaaagaagctcctcacagccagtgaccttgcagccagtgacctcaaaggatttcagccacaggcttacgaaaggccccagaaacattcaactctccattatgacacgggcctcccacaggacttcaccggtgacaccttaaaaccaaagcaccagcaaaaaagcagcagccagaaccacatggactggtccaccaactctgacagcggacccgtcactcagaattgcttcatcagtccagagtctggcagagaaactgcaagcaccagcaagatccccgctcttgagcccgtggcttcctttgcaaaggcccagggtaagaaaggcagtgcagggaacacgtggagtcagttgtctaacaataacaaagatctgctcttgggaggtgtggctccatccccaagcagccacagctcaccagccccacccagcagctctgctgagtgcaacgggcttcagcccttggtggatcaagatggaggaggtacaaaggagcccccagaaccacctacggtgggcagcaagaaaaagtccagtaaaaaagatgtgataagtcagaccataccaaacccagacctggattgggtcaagaatgcccagaaagcatttgacaatacagaagggaaaagggaaggttattccgcagatagtgcccaagaggcatcaccagccaggcagaacgtgagttctgccagtaatcctgaaaatgactcaagtcatgtccggattactatccccatcaaggcaccctctctggatccaaccaaccataagaggaaaaaaagacagtccattaaagcggtggtggaaaagatcatgccagagaaagccttggcttctggaatcaccatgagcagtgaagtagttaacaggatactttccaactctgaggggaataagaaggatccccgtgtccctaagttgagtaaaatgatagagaatgagtccccctcagttggccttgaaactggtggaaatgctgagaaagttatcccaggaggtgtgtctaagccgcggaagccacccatggtcatgacacctccaacgtgcacagatcactctccatccagaaagctgccagaaatccagcatccaaaatttgctgcaaaacgaaggtggacttgcagcaaaccaaaacctagcaccatgcttcgagaggcagttatggccacctctgataaactgatgctggagcccccgtctgcatatcccatcaccccatccagccctctctacaccaacacagacagtcttactgtgatcactccagtcaaaaagaagcggggacgaccaaagaagcagcctttgctcacagtcgagacgattcatgagggaacttccaccagccccgtcagtcccatcagccgagagtttcctggcactaagaaaagaaagcgacgacgcaatttagcgaagttggcccagctagtgccgggagaggacaaacccatgagcgagatgaaatttcacaagaaagttggaaagctcggcgtgttggataagaagaccatcaaaactatcaataagatgaagacactcaagaggaaaaacatcttgaatcagatcttgtcctgttccagcagcgttgctctgaaggcaaaagctcccccagagaccagccctggggcagcagccattgaaagcaaactgggcaagcagattaatgtcagcaagaggggaaccatctacattggcaagaagcggggcaggaagccaagagcagagctgccacccccatccgaagaacccaaaacagccatcaagcaccccaggcctgtttctagccagccggatgttccagccgtgccttccaactttcagtcacttgtggcgtcttcaccagcagctatgcacccactttcaacacagttaggtgggtccaatggcaacctgagccctgccagcactgaaaccaatttttcagagttgaaaactatgccaaatctccagcccatcagtgctcttccaaccaaaacccaaaagggaatacacagtggaacctggaagctgtctccacccagactgatggccaactccccttcacacctgtgcgagattggctccctaaaggaaatcacgctgtcccctgtgagcgagtcccacagtgaggagacgatccccagcgacagcggcattgggacagacaacaacagcacttctgaccaagcggagaagagctcagaatcccgaaggaggtactcttttgatttctgctccctggacaacccggaggccattccgtccgacaccagcacaaagaaccggcatggccaccggcaaaagcatctcattgtggacaactttctggcccacgaaagcctcaagaagccaaagcacaagaggaaacggaaaagcctgcaaaaccgcgatgacctccagtttctggcagacctggaggagctaatcaccaagttccaagtgttcagaatctcccaccggagttacaccttctaccacgagaatccatatcccagcatttttcggattaattttgatcactattacccggtgccatatatccagtatgacccgttgctctatcttcgtaggacttcagacttgaagtcaaagaagaagcgtggtaggcctgcaaaaaccaatgacaccatgacaaaggtgccttttttacaagggttcagctaccctattcccagtggaagttactatgcaccctatggaatgccttacacatcaatgcctatgatgaaccttggttattacggtcagtacccagctcctttgtacctatcgcacacgcttggagcagcttccccattcatgaggccaacagtgccaccacctcagttccacacaaactcccacataaagatgtccggtgcagctaagcataaagccaagcatggagtacacctgcagggacctgttagcatgggccttggtgacatgcagccttctctgaaccctcccaaggtaggcagtgccagtctgtccagtggtcggctccataagaggaaacacaaacacaagcataagcacaaggaagaccggatcctagggacccatgacaacctgagtggtctttttgcaggcaaagccacaggcttctccagccacatcctgagcgagcggctgagtagcgcagacaaagagctcccgctggtgagtgagaagaacaagcataaggagaaacagaagcaccagcacagcgaagccggccacaaagcttctaagaacaactttgaggtggacaccctgtctacactgtcactttccgacgcccagcattggacacaggccaaggaaaaaggagacttgagcagtgagcctgtggactcatgcacgaaaagatactctggcagtggcggggatggtggcagcacgagatcggagaacctggacgtgttcagtgaaatgaacccttcgaatgacaagtgggacagtgacgtgagtgggagtaaaaggaggagctatgaaggctttggaacgtacagggaaaaggacatccaagccttcaagatgaaccgcaaggagagaagttcttatgactcctccatgtctccagggatgccaagtccccacttaaaagtggaccagacagcagtgcatagtaagaacgaaggctcagtgcccaccatgatgaccaggaagaagccagccgcagttgacagtgttacaattccaccagccccagtgttatctctccttgctgcatctgcagcaacgtcggatgcagtcggctcctccctgaagaagaggttcaagcggcgggagatcgaagccatccagtgcgaagtgcggaagatgtgcaactacaccaagatcctgtccaccaagaagaacctggaccacgtgaacaagatcctgaaggccaagcggctgcagagacaatcaaaaacaggcaacaacttcgtgaagaagaggcgcgggcgtcccaggaagcagcccacccagttcgatgaggactccagagaccaaatgccggtgctggaaaaatgcatcgacctgcccagcaaaagaggccagaagcccagcctgagcccgctggtgctggagcccgccgccagccaagacaccatcatggccaccatcgaggcggtcatccacatggcccgggaggcgccgcccctgcccccgccaccgccgccgcccctgccgccaccgccgccaccacccctgcccccgccaccccctctacccaagaccccccgaggcggaaagaggaaacacaaaccgcaggcccccgctcagcccccacagcagtcgcccccgcagcagccccttccccaggaagaggaggtgaaagccaaaaggcagaggaagtcccgagggagtgagagcgaggtccttccctagggcgggtctgggcgtctgcacctggggcctagggaactgacacgtgggaagcgcagtgagccggggcgggggcggaatcccccgctgcagggacacccacgcccttctctccagaagccgggcaggcagaatccggccagacgacggggctgagccatcaggagctcttgggaaagcaaagcagggagacaccttcagaagaagcttgtctgagcttcaccgcagctcccaccacgcggcgcttcagtacggctggatcctccgcaggcgagcggaaggcccccaggaggagcaggctggtggcactctcctgacctcacgctgccaaggtgcgccctcgactcccgatttcatttgctggccaggaaaatcgaaagggaaacaccctcaattaggaaacattccaaggggagaaaagctgcaaattgctcaactggcattgctgtaacccgttccatttaattggtttttatttcttttgattttcaagctctgctaagctttggggtaccaacgtcatcttcaggtgacctgaatctttcccttaaccgtacagtttctcgatggaattgtgtgatcagaaggtggaattctagtgataggcgacctcagacccgcattcatgttctgtgtgcctcttctattgcacatacactgatttttagcattgtctattcctatttttcctttgcccattgtacttccatatatcttttcattaacttacttgctgccttttttttttcttggtacacatttaaataaagtaatccttaacctgtgctgtaaagttcacccttggcatgctgttccaagaacctgggtttgaatcccaatcgttgtgaaacatactcagtattgataaaacctttttaataagtgatgcagagcagccaaggatatgttgacccagatgtcaaccaggctatttttatacttaaaacatgtcagcagagcataggcagaataaaatggtttaaataccccacagcaaatagagtaactgacaaaccaccaaaaactgaaaccccagacccaccagaaagacaagtgtctagcaatgccttggtacctgatctttttcattcaaataattgtcataggttgttc

SEQ ID NO: 2082 - DNA, 2129 bp, Homo sapiens
aggactgtcagggtagtgggcgttgcgtgaggcgggtaaatgttcgcggaagcggcaaagacgacacggccttgtgggatggcggagtttaaggagaagcctgaggccccgactgagcagctggatgtcgcgtgcggccaggaaaacttgccggtgggcgcgtggcccccgggggccgcgccggcgcccttccagtacactcctgatcatgtagttggacctggagcagacattgatcccactcaaataacctttcccggatgcatttgtgtcaaaactccctgcctccctggcacttgctcctgtctccgccatggagagaactatgatgataactcatgccttagagatataggatctggaggaaagtatgcagagcctgtttttgaatgcaatgtcctgtgccgatgcagtgaccactgcagaaacagagtggtccagaaaggtctacagttccacttccaagtgttcaagacgcataaaaaaggctggggacttcgtaccttggaatttataccgaaaggaaggtttgtctgtgaatatgctggtgaggttttaggattctctgaagttcagagaagaattcacttacaaacaaaatccgactccaattacattatagccatcagggaacatgtttataatgggcaggtaatggaaacatttgttgaccctacttatataggaaatattggaagattccttaatcattcttgtgagccaaaccttttgatgattcctgtccgaattgactcaatggtacctaagttggcactttttgcagccaaagatattgtgccagaagaagaactctcttatgattattcaggaagatatcttaatctaacagtcagtgaagacaaagaaaggctagatcatgggaaactaaggaaaccttgttactgtggtgccaaatcatgtactgctttcctgccttttgacagttctctgtactgccccgtagaaaagtcgaacatcagttgtggaaatgagaaggaacccagcatgtgtggctcagccccttctgtgttcccctcctgcaagcgattgacccttgagactatgaaaatgatgttagacaaaaagcaaattcgagcaattttcttattcgagttcaaaatgggtcgtaaagcagcagaaacaactcgcaacatcaacaatgcatttggcccaggaactgctaacgaacgtacagtgcagtggtggttcaagaagttttgcaaaggagatgagagccttgaagatgaggagcgtagtggccggccatcagaagttgacaacgaccagttgagagcaatcatcgaagctgatccccttacaactacacgagaagttgctgaagaactcaatgtcaaccattctacggtcgttcgacatttgaagcaaattggaaaggtgaaaaagctcgataagtgggtgcctcatgagctgactgaaaatcaaaaaaatcgtcgttttgaagtgtcatcttctcttattctacgcaaccacaacgaaccatttctcgatcggattgtgacgtgtgatgaaaagtggattttatatgacaaccggcgacgatcagctcagtggttggatcaagaagaagctccaaagcacttcccaaagccaatcttgcacccaaaaaaggtcatggtcactatttggtggtctgctgctggtctgatccactacagctttctgaatcccggtgaaaccattacatctgagaagtatgctcaggaaatcgatgagatgaaccaaaaactgcaacgcctgcagctggcattggtcaacagaaagggcccaattcttctccacgacaatgcccgaccgcatgttgcacaacccacacttcaaaagttgaatgaattgggctatgaagttttgcctcatccaccgtattcacctgacctcttgccaaccaactaccacgtctttaagcatctcaacaactttttgcagggaaaacgcttccacaaccagcaggatgcagaaaatgctttccaagagttcgtcgaatcccaaagcacggatttttacgctacaggaataaaccaacttatttctcgttggcaaaaatgtgttgattgtaatggttcctattttgattaataaaaatgcgttgagcctaaaaaaaaaaaaaaaaa

SEQ ID NO: 2083 - DNA, 2890 bp, Homo sapiens
agtaacaaatgaagtgcgcgctgcgacacctcccagcccaccgaactccgccgccatttcctcgcttggcctaacggttcggccaatcccagcgcgcatcaagaaggactgaggctccgccaatcggaggccgccgatttcgacccttcgcctcggcccggcccaatccaggccccggccccgccgcccccggcccgcccccgcggtgccctctctcctccctctttgtgcgtctcgcgccgccgccgcccgccgcgtgagaggacgggctccgcgcgctccggcagcgcattcgggtcccctccccccgggaggcttgcgaaggagaagccgccgcagaggaaaagcaggtgccggtgcctgtccccgggggcgccatggcgaccggagcgaacgccacgccgttggacttcccaagtaagaagcggaagaggagccgctggaaccaagacacaatggaacagaagacagtgattccaggaatgcctacagttattccccctggacttactcgagaacaagaaagagcttatatagtgcaactgcagatagaagacctgactcgtaaactgcgcacaggagacctgggcatcccccctaaccctgaggacaggtccccttcccctgagcccatctacaatagcgaggggaagcggcttaacacccgagagttccgcacccgcaaaaagctggaagaggagcggcacaacctcatcacagagatggttgcactcaatccggatttcaagccacctgcagattacaaacctccagcaacacgtgtgagtgataaagtcatgattccacaagatgagtacccagaaatcaactttgtggggctgctcatcgggcccagagggaacaccctgaagaacatagagaaggagtgcaatgccaagattatgatccgggggaaagggtctgtgaaagaagggaaggttgggcgcaaagatggccagatgttgccaggagaagatgagccacttcatgccctggttactgccaatacaatggagaacgtcaaaaaggcagtggaacagataagaaacatcctgaagcagggtatcgagactccagaggaccagaatgatctacggaagatgcagcttcgggagttggctcgcttaaatgggacccttcgggaagacgataacaggatcttaagaccctggcagagctcagagacccgcagcattaccaacaccacagtgtgtaccaagtgtggaggggctggccacattgcttcagactgtaaattccaaaggcctggtgatcctcagtcagctcaggataaagcacggatggataaagaatatttgtccctcatggctgaactgggtgaagcacctgtcccagcatctgtgggctccacctctgggcctgccaccacacccctggccagcgcacctcgtcctgctgctcccgccaacaacccacctccaccgtctctcatgtctaccacccagagccgcccaccctggatgaattctggcccttcagagagtcggccctaccacggcatgcatggaggtggtcctggtgggcccggaggtggcccccacagcttcccacacccattacccagcctgacaggtgggcatggtggacatcccatgcagcacaaccccaatggacccccacccccttggatgcagccaccaccaccaccgatgaaccagggcccccaccctcctgggcaccatggccctcctccaatggatcagtacctgggaagtacgcctgtgggctctggggtctatcgcctgcatcaaggaaaaggtatgatgccgccaccacctatgggcatgatgccgccgccgccgccgcctcccagtgggcagcccccaccccctccctctggtcctcttcccccatggcaacaacagcagcagcagcctccgccaccccctccgcccagcagcagtatggcttccagtacccccttgccatggcagcaaagatccctccccgcggcggcgatggcccgagccatgagagtgaggactttccgcgcccattggtgacccttccaggcagacagcctcagcaacgcccctggtggacaggatggttcggcaaagcagcctgagttatttttgtggacggaatcggaacacgctggctccatatcgtgaaatttttattaatttttttctttttcctttgttacttctttatcttttcctttcttcagactccgtccaaggagatgctctccccggtcttctgctgcaatttagattcctttcccttctctccagttctccttcccttaccaaggagaggggagcaaatggttttgggcaagggctttggccattcatgtcaagctggttgtgggtttttcaaggtgccatagccacccccaaagatgtttgtttaaagcgtggggttttttaatctctgccacccttgtcaagggagtcttgtaaagttgccgagggtaggttcatctccaggtttcgggattcccatccgtcctggcgatcctgccagcagtgggtgggcagcctgagctccctcgggctcgcctgccagcctggagttcttcctgtgctccttgatcacctgagctgcctcagattccatttggtcctctccttcctggaaggcttccttttatgttttgttttaatcccaaatgtctgaatgttttgcagtgtgtaggggtttgagccccttgttcattctccttcctttttcctcccgcttccctctccatgaagtgattctgttgacaataatgtatactgcgcgttctcttcactggtttatctgcagaaatttctctgggcttttttcggtgttagattcaacactgcgctaaagcggggatgttccattgaataaaagagcagtgtggttttctgggaaaaaaaaaaaaaaaaaa

SEQ ID NO: 2084 - DNA, 3095 bp, Homo sapiens
agtaacaaatgaagtgcgcgctgcgacacctcccagcccaccgaactccgccgccatttcctcgcttggcctaacggttcggccaatcccagcgcgcatcaagaaggactgaggctccgccaatcggaggccgccgatttcgacccttcgcctcggcccggcccaatccaggccccggccccgccgcccccggcccgcccccgcggtgccctctctcctccctctttgtgcgtctcgcgccgccgccgcccgccgcgtgagaggacgggctccgcgcgctccggcagcgcattcgggtcccctccccccgggaggcttgcgaaggagaagccgccgcagaggaaaagcaggtgccggtgcctgtccccgggggcgccatggcgaccggagcgaacgccacgccgttggacttcccaagtaagaagcggaagaggagccgctggaaccaagacacaatggaacagaagacagtgattccaggaatgcctacagttattccccctggacttactcgagaacaagaaagagcttatatagtgcaactgcagatagaagacctgactcgtaaactgcgcacaggagacctgggcatcccccctaaccctgaggacaggtccccttcccctgagcccatctacaatagcgaggggaagcggcttaacacccgagagttccgcacccgcaaaaagctggaagaggagcggcacaacctcatcacagagatggttgcactcaatccggatttcaagccacctgcagattacaaacctccagcaacacgtgtgagtgataaagtcatgattccacaagatgagtacccagaaatcaactttgtggggctgctcatcgggcccagagggaacaccctgaagaacatagagaaggagtgcaatgccaagattatgatccgggggaaagggtctgtgaaagaagggaaggttgggcgcaaagatggccagatgttgccaggagaagatgagccacttcatgccctggttactgccaatacaatggagaacgtcaaaaaggcagtggaacagataagaaacatcctgaagcagggtatcgagactccagaggaccagaatgatctacggaagatgcagcttcgggagttggctcgcttaaatgggacccttcgggaagacgataacaggatcttaagaccctggcagagctcagagacccgcagcattaccaacaccacagtgtgtaccaagtgtggaggggctggccacattgcttcagactgtaaattccaaaggcctggtgatcctcagtcagctcaggataaagcacggatggataaagaatatttgtccctcatggctgaactgggtgaagcacctgtcccagcatctgtgggctccacctctgggcctgccaccacacccctggccagcgcacctcgtcctgctgctcccgccaacaacccacctccaccgtctctcatgtctaccacccagagccgcccaccctggatgaattctggcccttcagagagtcggccctaccacggcatgcatggaggtggtcctggtgggcccggaggtggcccccacagcttcccacacccattacccagcctgacaggtgggcatggtggacatcccatgcagcacaaccccaatggacccccacccccttggatgcagccaccaccaccaccgatgaaccagggcccccaccctcctgggcaccatggccctcctccaatggatcagtacctgggaagtacgcctgtgggctctggggtctatcgcctgcatcaaggaaaaggtatgatgccgccaccacctatgggcatgatgccgccgccgccgccgcctcccagtgggcagcccccaccccctccctctggtcctcttcccccatggcaacaacagcagcagcagcctccgccaccccctccgcccagcagcagtatggcttccagtacccccttgccatggcagcaaaatacgacgactaccaccacgagcgctggcacagggtccatcccgccatggcaacagcagcaggcggctgccgcagcttctccaggagcccctcagatgcaaggcaaccccactatggtgcccctgccccccggggtccagccgcctctgccgcctggggcccctccccctccgccgcctccaccgcctggttccgccggcatgatgatccctccccgcggcggcgatggcccgagccatgagagtgaggactttccgcgcccattggtgacccttccaggcagacagcctcagcaacgcccctggtggacaggatggttcggcaaagcagcctgagttatttttgtggacggaatcggaacacgctggctccatatcgtgaaatttttattaatttttttctttttcctttgttacttctttatcttttcctttcttcagactccgtccaaggagatgctctccccggtcttctgctgcaatttagattcctttcccttctctccagttctccttcccttaccaaggagaggggagcaaatggttttgggcaagggctttggccattcatgtcaagctggttgtgggtttttcaaggtgccatagccacccccaaagatgtttgtttaaagcgtggggttttttaatctctgccacccttgtcaagggagtcttgtaaagttgccgagggtaggttcatctccaggtttcgggattcccatccgtcctggcgatcctgccagcagtgggtgggcagcctgagctccctcgggctcgcctgccagcctggagttcttcctgtgctccttgatcacctgagctgcctcagattccatttggtcctctccttcctggaaggcttccttttatgttttgttttaatcccaaatgtctgaatgttttgcagtgtgtaggggtttgagccccttgttcattctccttcctttttcctcccgcttccctctccatgaagtgattctgttgacaataatgtatactgcgcgttctcttcactggtttatctgcagaaatttctctgggcttttttcggtgttagattcaacactgcgctaaagcggggatgttccattgaataaaagagcagtgtggttttctgggaaaaaaaaaaaaaaaaaa

SEQ ID NO: 2085 - DNA, 3527 bp, Homo sapiens
agtaacaaatgaagtgcgcgctgcgacacctcccagcccaccgaactccgccgccatttcctcgcttggcctaacggttcggccaatcccagcgcgcatcaagaaggactgaggctccgccaatcggaggccgccgatttcgacccttcgcctcggcccggcccaatccaggccccggccccgccgcccccggcccgcccccgcggtgccctctctcctccctctttgtgcgtctcgcgccgccgccgcccgccgcgtgagaggacgggctccgcgcgctccggcagcgcattcgggtcccctccccccgggaggcttgcgaaggagaagccgccgcagaggaaaagcaggtgccggtgcctgtccccgggggcgccatggcgaccggagcgaacgccacgccgttggacttcccaagtaagaagcggaagaggagccgctggaaccaagacacaatggaacagaagacagtgattccaggaatgcctacagttattccccctggacttactcgagaacaagaaagagcttatatagtgcaactgcagatagaagacctgactcgtaaactgcgcacaggagacctgggcatcccccctaaccctgaggacaggtccccttcccctgagcccatctacaatagcgaggggaagcggcttaacacccgagagttccgcacccgcaaaaagctggaagaggagcggcacaacctcatcacagagatggttgcactcaatccggatttcaagccacctgcagattacaaacctccagcaacacgtgtgagtgataaagtcatgattccacaagatgagtacccagaaatcaactttgtggggctgctcatcgggcccagagggaacaccctgaagaacatagagaaggagtgcaatgccaagattatgatccgggggaaagggtctgtgaaagaagggaaggttgggcgcaaagatggccagatgttgccaggagaagatgagccacttcatgccctggttactgccaatacaatggagaacgtcaaaaaggcagtggaacagataagaaacatcctgaagcagggtatcgagactccagaggaccagaatgatctacggaagatgcagcttcgggagttggctcgcttaaatgggacccttcgggaagacgataacaggatcttaagaccctggcagagctcagagacccgcagcattaccaacaccacagtgtgtaccaagtgtggaggggctggccacattgcttcagactgtaaattccaaaggcctggtgatcctcagtcagctcaggataaagcacggatggataaagaatatttgtccctcatggctgaactgggtgaagcacctgtcccagcatctgtgggctccacctctgggcctgccaccacacccctggccagcgcacctcgtcctgctgctcccgccaacaacccacctccaccgtctctcatgtctaccacccagagccgcccaccctggatgaattctggcccttcagagagtcggccctaccacggcatgcatggaggtggtcctggtgggcccggaggtggcccccacagcttcccacacccattacccagcctgacaggtgggcatggtggacatcccatgcagcacaaccccaatggacccccacccccttggatgcagccaccaccaccaccgatgaaccagggcccccaccctcctgggcaccatggccctcctccaatggatcagtacctgggaagtacgcctgtgggctctggggtctatcgcctgcatcaaggaaaaggtatgatgccgccaccacctatgggcatgatgccgccgccgccgccgcctcccagtgggcagcccccaccccctccctctggtcctcttcccccatggcaacaacagcagcagcagcctccgccaccccctccgcccagcagcagtatggcttccagtacccccttgccatggcagcaaaatacgacgactaccaccacgagcgctggcacagggtccatcccgccatggcaacagcagcaggcggctgccgcagcttctccaggagcccctcagatgcaaggcaaccccactatggtgcccctgccccccggggtccagccgcctctgccgcctggggcccctccccctccgccgcctccaccgcctggttccgccggcatgatgtatgccccgccccctcctcctccgcctcccatggacccttctaactttgtcaccatgatgggcatgggggtggcgggcatgccgcccttcgggatgcctccagctcccccaccgcctccaccacagaactagacttgttttttaagaaaatatatattatatatagagagaattggtctcgtttaaacacgccgaacctcaccatatggagccagacattgggacgcacgcatgtgattgtgtgtgcacgcatgtgtgtgtgtgcacgcactgggctgggccaagcgactgaggattcgcttgggaacgggcaggtggtagtaggggcgccagcttgggctctcctggcgccccgtagcatcgagtgtcttctttgtcttctttctctcctcacccaactccctttgcctctccccaaaccgggccgccaggatccctccccgcggcggcgatggcccgagccatgagagtgaggactttccgcgcccattggtgacccttccaggcagacagcctcagcaacgcccctggtggacaggatggttcggcaaagcagcctgagttatttttgtggacggaatcggaacacgctggctccatatcgtgaaatttttattaatttttttctttttcctttgttacttctttatcttttcctttcttcagactccgtccaaggagatgctctccccggtcttctgctgcaatttagattcctttcccttctctccagttctccttcccttaccaaggagaggggagcaaatggttttgggcaagggctttggccattcatgtcaagctggttgtgggtttttcaaggtgccatagccacccccaaagatgtttgtttaaagcgtggggttttttaatctctgccacccttgtcaagggagtcttgtaaagttgccgagggtaggttcatctccaggtttcgggattcccatccgtcctggcgatcctgccagcagtgggtgggcagcctgagctccctcgggctcgcctgccagcctggagttcttcctgtgctccttgatcacctgagctgcctcagattccatttggtcctctccttcctggaaggcttccttttatgttttgttttaatcccaaatgtctgaatgttttgcagtgtgtaggggtttgagccccttgttcattctccttcctttttcctcccgcttccctctccatgaagtgattctgttgacaataatgtatactgcgcgttctcttcactggtttatctgcagaaatttctctgggcttttttcggtgttagattcaacactgcgctaaagcggggatgttccattgaataaaagagcagtgtggttttctgggaaaaaaaaaaaaaaaaaa

SEQ ID NO: 2086 - DNA, 5136 bp, Homo sapiens
accttcgcggccgcaactcgctcggccgccgccatcttgcgagctcgtcgtactgaccgagcggggaggctgtcttgaggcggcaccgctcaccgacaccgaggcggactggcagccctgagcgtcgcagtcatgccggccggacccgtgcaggcggtgcccccgccgccgcccgtgcccacggagcccaaacagcccacagaagaagaagcatcttcaaaggaggattctgcaccttctaagccagttgtggggattatttaccctcctccagaggtcagaaatattgttgacaagactgccagctttgtggccagaaacgggcctgaatttgaagctaggatccgacagaacgagatcaacaaccccaagttcaactttctgaaccccaatgacccttaccatgcctactaccgccacaaggtcagcgagttcaaggaagggaaggctcaggagccgtccgccgccatccccaaggtcatgcagcagcagcagcagaccacccagcagcagctgccccagaaggtccaagcccaagtaatccaagagaccatcgtgcccaaagagcctcctcctgagtttgagttcattgctgatcctccctctatctcagccttcgacttggatgtggtgaagctgacggctcagtttgtggccaggaatgggcgccagtttctgacccagctgatgcagaaagagcagcgcaactaccagtttgactttctccgcccacagcacagcctcttcaactacttcacgaagctagtggaacagtacaccaagatcttgattccacccaaaggtttattttcaaagctcaagaaagaggctgaaaacccccgagaagttttggatcaggtgtgttaccgagtggaatgggccaaattccaggaacgtgagaggaagaaggaagaagaggagaaggagaaggagcgggtggcctatgctcagatcgactggcatgattttgtggtggtggaaacagtggacttccaacccaatgagcaagggaacttccctccccccaccacgccagaggagctgggggcccgaatcctcattcaggagcgctatgaaaagtttggggagagtgaggaagttgagatggaggtcgagtctgatgaggaggatgacaaacaggagaaggcggaggagcctccttcccagctggaccaggacacccaagtacaagatatggatgagggttcagatgatgaagaagaagggcagaaagtgcccccacccccagagacacccatgcctccacctctgcccccaactccagaccaagtcattgtccgcaaggattatgatcccaaagcctccaagcccttgcctccagcccctgctccagatgagtatcttgtgtcccccattactggggagaagatccccgccagcaaaatgcaggaacacatgcgcattggacttcttgaccctcgctggctggagcagcgggatcgctccatccgtgagaagcagagcgatgatgaggtgtacgcaccaggtctggatattgagagcagcttgaagcagttggctgagcggcgtactgacatcttcggtgtagaggaaacagccattggtaagaagatcggtgaggaggagatccagaagccagaggaaaaggtgacctgggatggccactcaggcagcatggcccggacccagcaggctgcccaggccaacatcaccctccaggagcagattgaggccattcacaaggccaaaggcctggtgccagaggatgacactaaagagaagattggccccagcaagcccaatgaaatccctcaacagccaccgccaccatcttcagccaccaacatccccagctcggctccacccatcacttcagtgccccgaccacccacaatgccacctccagttcgtactacagttgtctccgcagtacccgtcatgccccggcccccaatggcatctgtggtccggctgcccccaggctcagtgatcgcccccatgccgcccatcatccacgcgcccagaatcaacgtggtgcccatgcctccctcggcccctcctattatggccccccgcccaccccccatgattgtgccaacagcctttgtgcctgctccacctgtggcacctgtcccagctccagccccaatgccccctgtgcatcccccacctcccatggaagatgagcccacctccaaaaaactgaagacagaggacagcctcatgccagaggaggagttcctgcgcagaaacaagggtccagtgtccatcaaagtccaggtgcccaacatgcaggataagacggaatggaaactgaatgggcaggtgctggtcttcaccctcccactcacggaccaggtctctgtcattaaggtgaagattcatgaagccacaggcatgcctgcagggaaacagaagctacagtatgagggtatcttcatcaaagattccaactcactggcttactacaacatggccaatggcgcagtcatccacctggccctcaaggagagaggcgggaggaagaagtagacaagaggaacctgctgtcaagtccctgccattttgcctctcctgtctcccaccccctgccccagacccaggagcccccctgaggctttgccttgcctgcatatttgtttcgctcttactcagtttgggaattcaaattgtcctgcagaggttcattcccctgaccctttccccacattggtaagagtagctgggttttctaagccactctctggaatctctttgtgttagggtctcgatttgaggacattcatttcttcagcagcccattagcaactgagagcccagggatgtcctacaggatagtttcatagtgacaggtggcacttggctaatagaatatggctgatattgtcattaatcattttgtaccttgacatgggttgtctaataaaactcggacccttcttgtgaaatcagttaaataagacttgtctcggtcacctgtgccctgtccagactcgaggcagtggtaacactgcacagtgctatgtggcttctctttgaggatttttgggttttgtaactaaattcttgctgccctcatactttttatgtattagaatcatattcgtattgcccttttaaaacattgggatcctccaaaggcctgccccatgtatttaacagtaatacaggaagcatggcaggcaccatgcaaaccaaggatggatggtgcagtccctgtgtcagtgggcggtggtttcctgctggcctggaatcactcatcacctgattgattggctctgtggtcctgggcaggtgcctcataggtgtgtggatatgatgacgtttctttaaaatgtatgtatttaacaaatacttaattgtattaaggtcatgtaccaaggatttgataaagtttaaataatttactctctacttttatccattttatccattttaactcatgtaatcctcatgtgagtattcctgtttaacacttgagtaaactgaggcacagagaacataagttgcatgccatagtcacacactgtgaaagtgaaaagagaatgtgtgcaaaacacgtcacagtcctggtttctgagtaaaggcaggctgttatctttagaatcaagctatcacagggagataggcaatgctgtgggtgttggaggaaggtgagagcctgttgctaacaatttcctggttttaaagctaaggctgattttattgggaagatctcacatgtgtgtggcccctgagagttcccagtgccttttatttgcagtccttccatttggacctcctagctgccccatcaggtcatctccagggctcagaggggtgagaccatttcccaaggtcacagaaccagctctctagtcaccaccctgcctctccctctcacccagagtcagtaccagttttatggctttattacaaactgctgggtccctcccattttcaacttgattgatgggatgtcatcccttatcctgtctgacatttgcctctggcctggttgctagaagtttgccccaggggcaagagttgaaatttggcttcctgaggtgggctttgtggtttgcgtccctaaagtgagcccactactggttgcttgtccatggccaacaccagaaatcccctgagcactacctgggtctcattccaagaaggaagagggtcaggagacctggggagtctcatattccaagttcttctttctttctgggagcagtgggcagttcatggtgttagggcactcacccccacagactggcaaaccctgcaggacttccgtggctgaggctgtgaccggaggccaggaatgccgttgggtggattgtgagtgaatgggccctttgagctgccctctagagagcaaatccagtttcctggagctcctgaatgaatatctgtactggctcgctcagatgcagaagctccattgaccatgaggccttgtgaacatcagtggccacaggcccagtgtgctgcttggcactgcactagtttaggacctgcagcatgtaggtagcgtcctagtgtttataatacaaagctgctctgcacagcttttctgattcttcttgcaatctcctgaggattatctgccccatttttaaaacgaggtggaatacccaaggtcatgtagccagtgagtgctctggaaagccaaagcagctcatcccttcctggggaccacactgctctgctccaccagaccacactatgaaataggaataagtgctcctgttgcaggactgctgggaaaacaggtggtgtgggacttaagtcaccataattttgaagacttgcatgcagagggctccaggaattgtagacattaaggaatttcactttcagttctacccactacttaagtacttgtcatgtactcttagaggaggccagtaatgatcagaaccattttactttaaaattaataatattgtattagagaatatattaaatggttatattgggttatgttaggatatatacttgaatggaaatacatgtactattagcaatcatatttcatttatccctgtaattagacaagaaagcataatatagctctactcatgggtacacataccagtgtataagatttttagaagtttactttttaaaaataaaagcaaaatgtaagatcttaaaaaaaaaaaaaaaaaa

SEQ ID NO: 2087 - DNA, 1678 bp, Homo sapiens
ggaagtgctttctttgcccgccgttcgccaaacgaagtcgtggaggtggcgaaacgaggaggagataacgcggccttgggctctggtgtctcccagtctgctaaagccctaaggccatcaccatggacttccagcatcgccccgggggcaagaccgggagcgggggcgtggcctcctcctccgagagcaaccgtgaccgcagggagcgcctccggcagctggccctggagaccatcgacatcaacaaggacccgtacttcatgaagaaccacctgggctcctatgaatgcaaactctgcctgacacttcacaacaatgaggggagctacctggcacatacgcaggggaagaagcaccagaccaacctggcccggcgagcagccaaggaggccaaggaggcccctgcccagcccgcgcctgagaaggtcaaggtggaggtgaagaagtttgtgaagatcggccgcccgggctacaaagtgaccaagcagagagactcggagatgggccagcagagcctcctcttccagattgactaccctgagatcgccgagggcatcatgccacgtcaccgcttcatgtctgcgtacgagcagaggatcgagcctccggaccggcgctggcagtacctgctcatggccgccgagccctacgagaccattgccttcaaggtgccgagcagagagatcgacaaggcggagggcaagttctggacacactggaaccgggagaccaagcagttcttcctccagttccactttaagatggagaagcccccggctccacccagcctccctgctggcccccctggggtgaagcggcctccacccccgctgatgaacggtctgccccctcggccaccgctgcctgagtctttgccaccgcccccgccaggaggcctgcctctgccacccatgccccccacagggcctgcgccctcagggcccccgggaccaccccagctacccccgccagctccaggggtccaccccccggccccagtggtgcatccccctgcatctggggtccatcccccagctcctggcgtccaccccccagctcctggcgtccatcccccagcccctggggtccacccaccaacctctggggtccaccccccagctcctggagtccaccctccagcccccggggttcacccaccagcccccggagtccacccaccagcccctggggttcacccaccagccccaggggtccatcctcccccatcagcgggggttcacccccaggccccgggggtgcacccagcagcccccgccgttcaccctcaggccccaggggtgcacccaccagccccagggatgcaccctcaggccccgggggtccacccccaacctcccggggtccatccgtcggctcctggggtccaccctcagcctccgggagttcacccctcaaatcctggggtgcaccccccaactcccatgcccccaatgctgaggcccccacttccctccgaaggcccagggaacatacctccccctcccccaaccaactgagaagctgctccctcccccagcaagcccagcgccaggtgctcttgccttttcccactgagagaaggctgctcttttgtactgccccccgctcattaaacagcctcccccagccctgagtgcactgatgtccgcaaaaaaaaaaaaaaaaaaaaaaaaaaaaa

SEQ ID NO: 2088 - DNA, 2855 bp, Homo sapiens
ttccggcactcgcggaactttggtgcagcctgatgcgcaacgtggggactcaggcgcgctgggcggcaggagttgcttccggccgtgttggtggtctgaattgagaagccgcgactaagggaagatggagacaatactggagcagcagcggcgctatcatgaggagaaggaacggctcatggacgtcatggctaaagagatgctcaccaagaagtccacgctccgggaccagatcaattctgatcaccgcactcgggccatgcaagataggtatatggaggtcagtgggaacctgagggatttgtatgatgataaggatggattacgaaaggaggagctcaatgccatttcaggacccaatgagtttgctgaattctataatagactcaagcaaataaaggaattccaccggaagcacccaaatgagatctgtgtgccaatgtcagtggaatttgaggaactcctgaaggctcgagagaatccaagtgaagaggcacaaaacttggtggagttcacagatgaagagggatatggtcgttatctcgatctccatgactgttacctcaagtacattaacctgaaggcatctgagaagctggattatatcacatacctgtccatctttgaccaattatttgacattcctaaagaaaggaagaatgcagagtataagagatacctagagatgctgcttgagtaccttcaggattacacagatagagtgaagcctctccaagatcagaatgaactttttgggaagattcaggctgagtttgagaagaaatgggagaatgggacctttcctggatggccgaaagagacaagcagtgccctgacccatgctggagcccatcttgacctctctgcattctcctcctgggaggagttggcttctctgggtttggacagattgaaatctgctctcttagctttaggcttgaaatgtggcgggaccctagaagagcgagcccagagactattcagtaccaaaggaaagtccctggagtcacttgatacctctttgtttgccaaaaatcccaagtcaaagggcaccaagcgagacactgaaaggaacaaagacattgcttttctagaagcccagatctatgaatatgtagagattctcggggaacagcgacatctcactcatgaaaatgtacagcgcaagcaagccaggacaggagaagagcgagaagaagaggaagaagagcagatcagtgagagtgagagtgaagatgaagagaacgagatcatttacaaccccaaaaacctgccacttggctgggatggcaaacctattccctactggctgtataagcttcatggcctaaatatcaactacaactgtgagatttgtggaaactacacctaccgagggcccaaagccttccagcgacactttgctgaatggcgtcatgctcatggcatgaggtgtttgggcatcccaaacactgctcactttgctaatgtgacacagattgaagatgctgtctccttgtgggccaaactgaaattgcagaaggcttcagaacgatggcagcctgacactgaggaagaatatgaagactcaagtgggaatgttgtgaataagaagacatacgaggatctgaaaagacaaggactgctctagtgttcagggatgtagctcagcttttgggctagcccaggcttccctaagatctgctttttctatttctcccaaccaaatcctcttaaagaccctttgctatgtagtctcatggtctagcatgcatcttgtagaaacaaggcatgctggcagattgcagggttgagatgtgttttatctgttttatattttaaaagattctgccagaaaataaaaccagaccttgttctaaagcccagggttatggaccaactcagtgcttcaggtcttaacgcctccatacctcttcctcaccaactttactagtagctgagatttaatgggcacctattatgctacatatcatgttaggtaaatctgacctgacctctttccccaccctcctttgttgctgcttccctgaatgagtattaccccaggatgaggtctgccatcagcttagttagccattgatgcaaatactagggaaagactaggaggatgagccagggttgctactaaggactaagtgtcgcaccaaggtttgccttttgtatttgcataaagaaaggagttggagctgggtgcagtggcttgtgcctgtagtcccagctacttgggaggctgaggcaggagggttgcttgagactagcctaggtaacatagtgagaccctgtctcattaaaaaaaaaaaaaaggcatggtggcacgcactgtagtcccagctactcaggagactgaggctagaagatcctttgaacctaggagtttgagaccagcctgggcgatatagtgaggccccatctcaaaaaaaaaaaaaggggggggggggggagttgggctgtgttggaatgggcctgcagcccaacaaacaagggaactaggaccgacagtgacttcaccagcttgctaggtcagaatgagagactggtgggtctgtctacctgtttcttctacaagatccctatttgactgtaaaagtagctaatactcacatgttctccaatcccaggtagccatggtagagttgggtagagttgagcagctgccccaggatccaaatgtggtgtctgaaatggaaagaactaaggcaaccaggaaggcactgatctgccttataagcacagtcatctgaaagtcaggcctgctgcaggacaggatcccccagagaccccatttgcctctcaacactcagaccttcaactgttttttaataaatctactttttaaaaaaaaaaaaaaaaaaaaa

SEQ ID NO: 2089 - DNA, 647 bp, Homo sapiens
ggaagttcttgggagcgccagttccgtctgtgtgttcgagtggacaaaatggcgaagatcgccaagactcacgaagatattgaagcacagattcgagaaattcaaggcaagaaggcagctcttgatgaagctcaaggagtgggcctcgattctacaggttattatgaccaggaaatttatggtggaagtgacagcagatttgctggatacgtgacatcaattgctgcaactgaacttgaagatgatgacgatgactattcatcatctacgagtttgcttggtcagaagaagccaggatatcatgcccctgtggcattgcttaatgatataccacagtcaacagaacagtatgatccatttgctgagcacagacctccaaagattgcagaccgggaagatgaatacaaaaagcataggcggaccatgataatttccccagagcgtcttgatccttttgcagatggcttctattctgctgcttgaagtcagaactgctgatggagacaaaggcacgaaagtgtacgtattccggattagcaacccaggaacccatcacttctgaagactctaaactgtgctgtcattttgtttttatatgcattaaaatatttgttttaaaaaaaaaaaaaaaaaaaaaaaaaaaaaaa

SEQ ID NO: 2090 - DNA, 783 bp, Homo sapiens
cgagtctcgctcaggctcggttttaccccggagtctattcgaagggggctgctacgtcagcgcgtctcagcgtaagacggcgctattccgctgtaacagcttccggcgggtcctggatgttgatgtcctgcatctaacgcggtgtaacccccgaagccgagcgagctccggaggaatttcagtatctgctacggtaacttcatcagcccgccaagatggcgatgcaagcggccaagagggcgaacattcgacttccacctgaagtaaatcggatattgtatataagaaatttgccatacaaaatcacagctgaagaaatgtatgatatatttgggaaatatggacctattcgtcaaatcagagtggggaacacacctgaaactagaggaacagcttatgtggtctatgaggacatctttgatgccaagaatgcatgtgatcacctatcgggattcaatgtttgtaacagataccttgtggttttgtactataatgccaacagggcatttcagaagatggacacaaagaagaaggaggaacagttgaagcttctcaaggagaaatatggcatcaacacagatccaccaaaataaatgttttctacattttcatttggactaaatcccacgaatgacaactaccacctttttttcctttttaattaatactaaatattgtgatttcttatttgaggttcaaaatgacctgcttgaaactttgatacatattggaatacattatgttaataaacttgtagctttttgtgaaacaaaaaaaaaaaaa

SEQ ID NO: 2091 - DNA, 4357 bp, Homo sapiens
gccgcgcgccaccagaatgtccctgtcttgaggtctaatggcggacgccagtatgttggagttggtggtggcttaagttttgaagggaggtagcatccgttggatatccacaccatccttctcgctgcaggctttcttggactccgtactgttggtgtaaccaaggcctggaggtctgggtggctcaggtttcctgcagccatgtttctgtacaacttaaccttgcagagagccactggcatcagctttgccattcatggaaacttttctggaaccaaacaacaagaaattgttgtttcccgtgggaagatcttggagctgcttcgcccagaccccaacactggcaaagtacataccctactcactgtggaagtattcggtgttatccggtcactcatggcctttaggctgacaggtggcaccaaagactacattgtagttggcagtgactctggtcgaattgttattttggaataccagccatctaagaatatgtttgagaagattcaccaagaaacctttggcaagagtggatgccgtcgcatcgttcctggccagttcttagctgtggatcccaaagggcgagccgttatgattagtgccattgagaaacagaaattggtgtatattttgaacagagatgctgcagcccgacttaccatttcatctcccctggaagcccacaaagcaaacactttagtgtatcatgtagttggagtagatgtcggatttgaaaatccaatgtttgcttgtctggaaatggattatgaggaagcagacaatgatccaacaggggaagcagcagctaatacccagcagacacttactttctatgagctagaccttggtttaaatcatgtggtccgaaaatacagtgaacctttggaggaacacggcaacttccttattacagttccaggagggtcagatggtccaagtggagtactgatctgctctgaaaactatattacttacaagaactttggtgaccagccagatatccgctgtccaattcccaggaggcggaatgacctggatgaccctgaaagaggaatgatttttgtctgctctgcaacccataaaaccaaatcgatgttcttctttttggctcaaactgagcagggagatatctttaagatcactttggagacagatgaagatatggttactgagatccggctcaaatattttgatactgtacccgttgctgctgccatgtgtgtgcttaaaacagggttcctttttgtagcatcagaatttggaaaccattacttatatcaaattgcacatcttggagatgatgatgaagaacctgagttttcatcagccatgcctctggaagaaggagacacattcttttttcagccaagaccacttaaaaaccttgtgctggttgatgagttggacagcctctctcccattctgttttgccagatagctgatctggccaatgaagatactccacagttgtatgtggcctgtggtaggggaccccgatcatctctgagagtcctaagacatggacttgaggtgtcagaaatggctgtttctgagctacctggtaaccccaacgctgtctggacagtgcgtcgacacattgaagatgagtttgatgcctacatcattgtgtctttcgtgaatgccaccctagtgttgtccattggagaaactgtagaagaagtgactgactctgggttcctggggaccaccccgaccttgtcctgctccttattaggagatgatgccttggtgcaggtctatccagatggcattcggcacatacgagcagacaagagagtcaatgagtggaagacccctggaaagaaaacaattgtgaagtgtgcagtgaaccagcgacaagtggtgattgccctgacaggaggagagctggtctatttcgagatggatccttcaggacagctgaatgagtacacagaacggaaggagatgtcagcagatgtggtgtgcatgagtctggccaatgtaccccctggagagcagcggtctcgcttcctggctgtggggcttgtggacaacactgtcagaatcatctccctggatccctcagactgtttgcaacctctaagcatgcaggctctcccagcccagcctgagtccttgtgtatcgtggaaatgggtgggactgagaagcaggatgagctgggtgagaggggctcgattggcttcctatacctgaatattgggctacagaacggtgtgctgctgaggactgtcttggaccctgtcactggggatttgtctgatactcgcactcggtacctggggtcccgtcctgtgaagctcttccgagtccgaatgcaaggccaggaggcagtattggccatgtcaagccgctcatggttgagctattcttaccaatctcgcttccatctcaccccactgtcttacgagacactggaatttgcatcgggttttgcctcggaacagtgtcccgagggcattgtggccatctccaccaacaccctacggattttggcattagagaagctcggtgctgtcttcaatcaagtagccttcccactgcagtacacacccaggaaatttgtcatccaccctgagagtaacaaccttattatcattgaaacggaccacaatgcctacactgaggccacgaaagctcagagaaagcagcagatggcagaggaaatggtggaagcagcaggggaggatgagcgggagctggccgcagagatggcagcagcattcctcaatgaaaacctccctgaatccatctttggagctcccaaggctggcaatgggcagtgggcctctgtgatccgagtgatgaatcccattcaagggaacacactggaccttgtccagctggaacagaatgaggcagcttttagtgtggctgtgtgcaggttttccaacactggtgaagactggtatgtgctggtgggtgtggccaaggacctgatactaaacccccgatctgtggcagggggcttcgtctatacttacaagcttgtgaacaatggggaaaaactggagtttttgcacaagactcctgtggaagaggtccctgctgctattgccccattccaggggagggtgttgattggtgtggggaagctgttgcgtgtctatgacctgggaaagaagaagttactccgaaaatgtgagaataagcatattgccaattatatctctgggatccagactatcggacatagggtaattgtatctgatgtccaagaaagtttcatctgggttcgctacaagcgtaatgaaaaccagcttatcatctttgctgatgatacctacccccgatgggtcactacagccagcctcctggactatgacactgtggctggggcagacaagtttggcaacatatgtgtggtgaggctcccacctaacaccaatgatgaagtagatgaggatcctacaggaaacaaagccctgtgggaccgtggcttgctcaatggggcctcccagaaggcagaggtgatcatgaactaccatgtcggggagacggtgctgtccttgcagaagaccacgctgatccctggaggctcagaatcacttgtctataccaccttgtctggaggaattggcatccttgtgccattcacgtcccatgaggaccatgacttcttccagcatgtggaaatgcacctgcggtctgaacatccccctctctgtgggcgggaccacctcagctttcgctcctactacttccctgtgaagaatgtgattgatggagacctctgtgagcagttcaattccatggaacccaacaaacaaaagaacgtctctgaagaactggaccgaaccccacccgaagtgtccaagaaactcgaggatatccggacccgctacgccttctgagccctcctttcccggtggggcttgccagagactgtgtgttttgtttcccccaccaccatcactgccacctggcttctgccatgtggcaggagggtgactggataattaagactgcattatgaaagtcaacagctctttcccctcagctcttctcctggaatgactggcttcccctcaaattggcactgagatttgctacacttctccccacctggtacatgatacatgaccccaggttccagtgtagaacctgagtcccccattccccaaagccatccctgcattgatatgtcttgactctcctgtctacttttgcacacacccttaatttttaattggttttcttgtaaatacagttttgtacaatgttatctctgtgggaggaaggaggcaggctgtggtgggactgggtagggtatagtatcactcctgagttccactgctctagaatctaaccagaaatagaaacctagtttttaaggtgaaaaaaaaaaaaaaaaaa

SEQ ID NO: 2092 - DNA, 1570 bp, Homo sapiens
tgaggtcagaaggcggaaccgctgctgggagacggcgggatctctttcgccatggctgccgggccgatctccgagcggaatcaggatgccactgtgtacgtggggggcctggatgagaaggttagtgaaccgctgctgtgggaactgtttctccaggctggaccagtagtcaacacccacatgccaaaggatagagtcactggccagcaccaaggctatggctttgtggaattcttgagtgaggaagatgctgactatgccattaagatcatgaacatgatcaaactctatgggaagccaatacgggtgaacaaagcatcagctcacaacaaaaacctggatgtaggggccaacattttcattgggaacctggaccctgagattgatgagaagttgctttatgatactttcagcgcctttggggtcatcttacaaacccccaaaattatgcgggaccctgacacaggcaactccaaaggttatgcctttattaattttgcttcatttgatgcttcggatgcagcaattgaagccatgaatgggcagtacctctgtaaccgtcctatcaccgtatcttatgccttcaagaaggactccaagggtgagcgccatggctcagcagccgaacgacttctggcagctcagaacccgctctcccaggctgatcgccctcatcagctgtttgcagatgcacctcctccaccctctgctcccaatcctgtggtatcatcattggggtctgggcttcctccaccaggcatgcctcctcctggctccttcccacccccagtgccacctcctggagccctcccacctgggatacccccagccatgcccccaccacctatgcctcctggggctgcaggacatggccccccatcggcaggaaccccaggggcaggacatcctggtcatggacactcacatcctcacccattcccaccgggtgggatgccccatccagggatgtctcagatgcagcttgcacaccatggccctcatggcttaggacatccccacgctggacccccaggctctgggggccagccaccgccccgaccaccacctggaatgcctcatcctggacctcctccaatgggcatgcccccccgagggcctccattcggatctcccatgggtcacccaggtcctatgcctccgcatggtatgcgtggacctcctccactgatgcccccccatggatacactggccctccacgacccccaccctatggctaccagcgggggcctctccctccacccagacccactccccggccaccagttccccctcgaggcccacttcgaggccctctccctcagtaaattcacattttccttcctcctgttacattttcccaatatcttttctattccttggaccaatcagagatgctgtagctccttggggcaaaggtactaatccctttcagcacccccactccattcccctttttaatgtaactttttccacaggaggtatttcttttttatgttggtcctgagtattttgcaaatgcacagagaaaataaaactaaactccttgttaaaaaaaaaaaaaaaaaaaaa

SEQ ID NO: 2093 - DNA, 2060 bp, Homo sapiens
gagagagttggttggtgttgggccggaggaaagcgggaagactcatcggagcgtgtggatttgagccgccgcattttttaaccctagatctcgaaatgcatcgtgattcctgtccattggactgtaaggtttatgtaggcaatcttggaaacaatggcaacaagacggaattggaacgggcttttggctactatggaccactccgaagtgtgtgggttgctagaaacccacccggctttgcttttgttgaatttgaagatccccgagatgcagctgatgcagtccgagagctagatggaagaacactatgtggctgccgtgtaagagtggaactgtcgaatggtgaaaaaagaagtagaaatcgtggcccacctccctcttggggtcgtcgccctcgagatgattatcgtaggaggagtcctccacctcgtcgcagatctccaagaaggagaagcttctctcgcagccggagcaggtccctttctagagataggagaagagagagatcgctgtctcgggagagaaatcacaagccgtcccgatccttctctaggtctcgtagtcgatctaggtcaaatgaaaggaaatagaagacagtttgcaagagaagtggtgtacaggaaattacttcatttgacaggagtatgtacagaaaattcaagttttgtttgagacttcataagcttggtgcatttttaagatgttttagctgttcaaatctgtttgtctcttgaaacagtgacacaaaggtgtaattctctatggtttgaaatggatcatacgaggcatgtaataccaagaattgttactttacaatgttcccttaagcaaaattgaatttgctttgaacttttagttatgcacagactgataataaacctctaaacctgcccagcggaagtgtgtttttttttaaatttaaatacagaaacaactggcaaaaatgaactaagatttacttttttttccatagctgggatataggctgcagctatagttgaacaagcagtctttaaaaactgctgtgaaacacaggccatcagggaaaacgaaatgctgcactattaaattagaggtttttgaaaaatccaactctcatcctgggcagaggttgcctagttggtatagaatgttaagtttcaagaaagtttacctttgctttaggtcataagttccttatttgattgctgtatatggatacatggctgttcgtgacattctttatgtgcaaatttgtgatttcaaaaatgtcctgccagtttaagggtacattgtagagccgaactttgagttactgtgcaagatttttttttcatgctgtcatttgtaatatgttttgtgagaatccttgggattaaagttttggttacaaattgttctttaacttgaaagcctgtttttccttgcaaactcaaatctgtgagcttggtaccaagtccaggtataacattcctattggaagccatacttatattttcttgtaaagtgcttttgaattaataaaatattagcataattgtgtatagtcagttgaacccactgttaccattgttcttatcccatgggaagcagttggttacacgattcttattttataagaaacagctgagaggcactatggattagtcttctgaagtgaaggaaatatagatgtcacctaagtgatagttaacccattttttttttttttaggcatagaagccagttcagggtccataatatttagtgaccaacattttaaagtatagcagcaacctggttcttaaacacaaagtaagttgcccattaacaaatggcttttatctttagcatgaaaactttccacaggtctaaaaattgcttccattttataatttgaggtgttgcatgggaattctaagctgatccatcatgatgtaaaagttcacaatatggttcaaatgtaacagtgcagaattgaatatggaggcatgcataaccttcctcttagaaaatggcaggtgttgtaatttcaaatttttgtgcaattagattaaatcataatgcaacagtcaaaaaaaaaaaaaaaaaaaaaaaaaaaa

SEQ ID NO: 2094 - DNA, 2158 bp, Homo sapiens
ccgttgccgccgccgccgctgccgccgtgctctcgctttgcccgccgccgcctaaggggggctggggccggggccagccatcactgccgttgccgggatgccgcgggtgtacatcggccgcctgagctaccaggcccgggagcgcgatgtggagcgcttctttaagggctacgggaagatcctggaggtggatctgaagaacggatatggttttgtggagtttgatgatctgcgtgatgcagatgatgctgtttatgaactgaatggcaaagacctttgtggtgagcgagtaattgttgagcatgcccgcggcccacggcgagatggcagttacggttctggacgcagtggatatggttatagaagaagtggccgagataaatatggccctcctactcgcacagagtacagacttattgtggagaatttgtcaagtcggtgcagctggcaagacctaaaggattatatgcgtcaggcaggagaagtgacttatgcagatgctcacaagggacgcaaaaatgaaggggtgattgaatttgtatcttattctgatatgaaaagagctttggaaaagttggatggaactgaagtcaatgggagaaaaatcagattagttgaagacaagccaggttccagacgacgccggtcctactccagaagccggagtcattcaaggtctcgctctcgaagcagacattcccgtaagagcagaagccgaagtggcagcagcaaaagcagtcattctaagagtagatctcggtccaggtcgggctcccgctcccggagcaagagccggagccggagccagagtcggagccggagcaagaaagagaaaagcaggagccccagcaaggaaaagagccgcagccgcagccatagcgctggcaagagccgcagcaagagcaaagaccaagctgaagagaagatccaaaacaatgacaatgtcgggaaacccaagagccggagtcctagcaggcataaaagtaagagcaaaagtcggagcaggagtcaggagaggagagtggaggaggagaagcgagggagtgtgagcaggggcaggagccaggagaagagcctccgccagagtcggagccggagcaggagcaaagggggcagcaggagccggagcaggagccgcagcaagagcaaggacaagaggaagggcaggaagagaagcagagaggagagccgcagtcgcagtcgcagccgcagcaagagtgagaggagcagaaagcgaggcagcaagcgagacagcaaggcgggcagcagcaagaagaagaagaaggaagacactgaccgctcccagtccagatctccatcccgctccgtgtcaaaggagcgggaacatgccaagtctgaatccagccagagggaaggtcgaggagagagtgagaatgctggcaccaatcaggagacccggtccaggtcgagatccaattccaaatcgaaaccaaaccttccatcagaatcacgctccagatcaaagtcagcttcaaaaacccgatctcggtccaagtctagatccaggtctgcttccagatcgccctcccgatctagatctaggtcccactcaaggtcctaactggctatggccacagctggaactacccgagaagtcttttgtacatgtttggtagccgtagcacaagtgattggagtagaacatgtcactgctgtacatttttaactcccctaatggtgtgtctataattgttaaatctaagtgcttcctctcagtaaagcctcctggcaccaggccttcctgctcgactgaaaaaaattttctctttgaaaatccccttttactcatggcccacagtagaatatccaaaacgccttggctttcaggcctggcctttcctacagggagctcagtaacctggacggctctaaggctggaatgaccacataggtaggtatggtgagttcaaccatttttgctcttgaattgatgcccttcgatgtatgccatttagtgaaagtgctaagtcttaagtttcctaccactttggtttcatatttttggacttaacaaagttgtgaatagcacagtcgaggaaaattgatacctgcagtaacccataggaaataaactgtagagttccatattctggtattgtgattatattgttttatattaaaaaaaaaaaaaaaaaaa

SEQ ID NO: 2095 - DNA, 8052 bp, Homo sapiens
agagaggacttatctccagcatctagcactacagagcagaggctgtgtggagaatggctgaaaaatcagaattggttgtagaagcagttttctttctggttgtgagtatgagcccggcagacaccatgagcgctgttgcaggggagtcggcctgtgcttgacacatgtgtttcccattgatagctggagacagcccagtagctgtgagtcggtctgacaaagccatattgaagtacggagtacggtttcaaagcagtcagaaaaagaacgggaatgctgttcaggaaattcttcaggcatgggcagggacttggctgcagttctgcagttggaaaatctgactggggcagcttctgagcgcaggctgggcctgcacacactcagcgggccgagtggccacctccttcagagctgctcagcacgccctgggatcgcgggcggttttcatcggccggtttgtgaaacggacaagagagagacattactgccgggagtgttgagtgaagggaccaggtggagatgatgcctcaggagcagtacactcaccaccggagcaccatgcctggctctgtggggccacaggtatacaaggtggggatttatggctggcggaaacgatgcctgtatttctttgtcctgctcctcatgattttaatactggtgaacttggccatgaccatctggattctcaaagtcatgaacttcacaattgatggaatgggaaacctgaggatcacagaaaaaggtctaaagctagaaggagactctgaattcttacaacctctctacgccaaagaaatccagtcccgaccaggtaatgccctgtacttcaagtctgccagaaatgttacagtgaacattctcaatgaccagactaaagtgctaactcagcttataacaggtccaaaagccgtagaagcttatggtaaaaaatttgaggtaaaaactgtttctggaaaattgctcttctctgcagacaataatgaagtggtagtaggagctgaaagattacgagttttaggagcggagggcacagtgttccctaaatctatagaaacacctaatgtcagggcagaccccttcaaagaactaaggttggagtccccaacccggtctctagtgatggaggccccaaaaggagtggaaatcaatgcagaagctggcaatatggaagccacctgcaggacagagctgagactggaatccaaagatggagagattaagttagatgctgcgaaaatcaggctacctagactgcctcatggatcctacacgcctacaggaacgaggcagaaggtcttcgagatctgcgtctgcgccaatgggagattattcctgtctcaggcaggagctgggtccacttgtcagataaacacaagtgtctgcctctgaaagactatccatagtggacattgttggcagcataaaggccttttttggctttagacactggctgccagctatttttactagaacacagaaagcctatcaaagaccttgtgtgtatgtgtacgtgtgtgtgcgtgcttgagtgtgttcgcgtgtgtgggtggatataaatatatataaatatatataaataaatatatatatcctctgtataaaatgaggtttcagtacaaaaggaaccatgggtgaccctgcgatatccactgtcattttccatcccatccccaccacctgagtgacagaaatctaaacacacatccgtcccaacattccccagaccattcagaatcacacagcgtattaaacactgacagaatcttcatctagatattcgagtagcagcatatcttctcttttagtgtcattacgagggagtgatggcgggaatctcagtcgcactcaagctctgagacctttgtatcaaaaataggcatttgatttcctgttttagctttagtaaggctggctaacttccccctcttcaagctaggaactggcaatgctgtagaagtcagccgtaggaattcaaaatggctggcctaccttggctaccagacatattggggtttttgtagttgaatgaatgaggaggatgaatttcagcaaattttgaactgctcacccaacttctgctatcttgctccctccaaactcacagattctcctacagtcaaattaggagctgtaaatcagcacaaaataagataacagctgttcctcagtgagctggaagctacttaatggcctgatgggcaatgaacaaacgggtgatatgtctctgtttaagggaaaaatggcttaaaagctgttctgttctcacttctgactttaaccaaaagatttcaacccacaatgatcaggtcaatcaaaatccctaagagcagaactcctaccccaaaagaagcctggaagtctaattaagagtagcataaggaacctaattatgtttaccatgtttcttgggattggtgggaaatgtcaaaacatgccctttatttttaaaggcattcacaaactctctgactttgttcttcttatatattttttcagtgccgggatattcatattcctaaagccactattgtgttttctctaagaagcactacatgccaccagaattgtgcactgaaagataatacaaactgagtgtctttatgagaatcactgtgtcccctgaggcccagcagtacctgcttccctgtatgtggaagcagcacctcattcccgccatcagctacctctcatcaccccaccttcatcatcatgctccagggtcaccctggccagctcttgtgctgggacaggggattacaccatctctgttcaaagagggggaaatgtgcctatgccttaagtcaatgcactcagcaaggagaagcacatcttatttatcttgttacctatagtttactttgggtgattggaggggaatgacttagttatgactggacatcttaaaagctgatagacaagccaaatggctggcagatgatgtggatttcaaagagcccagaatgaactcatcactggcttagacagtcctggatgccatttggaaagtagtggccctgcaagcctaaatgaagtagtatttgtaggcctgggtggcatttggatttttcttttccctcaacaaggttttactttttcttactttacaagcaagggaagttttgtgataggagagaaataaaagatttgatattttttgagatgacactcaagcatcaggctgagatttgcacacatgggatgtaaaagcaagctgtgtgttgcttagtcacttacttagaagtagatggtgggggacagcggcgtgggtcctagcctggccagtgatgctgctggcgtccagaccccagactcactccaagcactcttgttcaatatctcatgcagaagagttgggctggtcactcttaggggtgagaccccgtgattggttggtttgtagcactaaggtctaaaaaggaaaaccataaaagacatcagattacgctggatcagtataattaatattccatagggccatgttgccagaatctgtatgtatcaatacagggtttttccaagccaggaaacgccctccttggctactaggagcacctatcccatatcattcagataaacaatgatagctacaaagtcatttgtggctagataggttaagacaggtgattttttaaagtagactgtctttgcattttgccatctgaagttcattaatctttagatgacaaaaaagcaaaaagttcccagaacgtttttgcttagattttgttctaatcaccacgtgaaggaatgagattagcaccacaagtttcatgccaataaaagagactggtgtgatcccacatgcaaaatttaatcctaagggtagtgagatcacaaacagaataaaaataagagcaatcaaccatataaatcaagtacctattgggaacagacataacattcaatttttcatttatgctaagtgaccacagtatacaaagtaataagcaggaaatttgatatgggttaaattatgcattttgttcagattttggaaattggtatgcattataagtttctcaatgtacatctttttatcccaacaccctcaaactagaatatttgtcagtggtcaagagaaaaaattttacctgaattcttgggggccggcggggagcttttacattaaaaatctactaacgcctactttttaaaaaatgagattctttctaatctttatatatgacattttctagacaatcgcacctttgggtatattaaacagctggtatcataacaaagaatccaaatgaaccttcaatatactagaagttctagtaggttaatattgttcagaagatttttacaaattaaaaactgatttccaaatatgttcaacatttacttctatttgatatctgctcaagaagtcatagaagtcttgggaaactattcgagtatcacagaggttttcaaaagcccttatggtgacatctacctaggtaaaagcctgacatgtggctttataattgttatgttacccaagggataaacttgaactggctttgaacatcctttaggtcattttctctttggataattttcatcgcatatccggcaactatagaccaaagtttgcttaaggtttgaccctagagcagaggtgggcaaactatgacctggaaaccaaatctgacttaccaccttttcctgtagttaaagttttattgtcacatagccacatacattcatttacatgttttctgattttacactacagcagcaggatggagtagttgtgtcagagactatgtatcccacaaagcatagattacttactatttagtcctttacaggcaaagtttcctcacccctgacctagaggtttttgtggtatgcattggatatagcaggaaagaaagcacatttccaaacagcagggagtaagcttacatttctgtgtaggtttgggaatatagttacttggcaaagtctttcaggaaggaagcccttccttatgttacatgtggaaagcctgccttccaagacatgtggaagtaattgatccacctgccagagaaacacaggctcagaggatgcctgggaacagggaggatgggattagtggaagcttaatggaaaaggaaagttatgatcctccaagacccttaattgatagaccataccaggttctgcaggtcagcatcattgtgtaatgagagtgaagtaggggaccctgtggttcaaccttagaatctgtttcctgtaggctctttctgctgtctatattcattaaagttttccacttcaccctcccatagtctagagggatgcccattccatggtcctccagagaatagttttgacttaacatgtctgtttagcccacatcacgtcagttatcaacaccgccactgtgcttactgttcctacagccacaccaggcttgaagagttagtgagaccaacaaataattggaagtattggaaaaagcaaaatacatggggacaaaaaaaatacagtgaaattctttttatcaaactgatgctgtgagaaaccagatgaatgccagtttggctttatttctaagaatctgggtcttcattctctggtgtagaaggaatgcaaaaaactataacaacaacaacaaaaacatattttgaaaagacatattctgacatctctgcttgtgtgtggtaaggcaggttcctatcagacatttatccctttggtcaagatcccttttgctcatccagggtttcatactcaatatcgcttaaaaaaaaaaaagtatcagctagggatgactctggaagtatgagtatcatggtggggaggaaggaattttttttaaatgtaaatgacccccatttaccagaccctaatcaaagtcacttaagggaatccctcagccttttatttggaaacagttgaaataaactggcagcagctagatcagagtatcttgctttattttataaaggccaaaggtagtatgaagtttggaccaaaaaggtaaatagatccattccagcacctgatactgatttttcaaggctctatgaaaggtcaaaaatttcattaaacaagaccagttctccctcttccccctgtcccaagaaatcttaggcatgaaaaggataaggaaacagctcctggaatgatacatttgcatagtgccctagtagcaggttgggaaaaagttataatataagaaacaaccttcgaaaacaggccttttatctcaaagataaaatgtctttcttgtggtctttcatcactatctccgtggtggaaggttcccctagttccaacatatttccattaaaatagtcaaagccacggcattgggatgtcagatgcctctctttctttgtggtaatcggaatttaaaattatacagttgcctctgaatttctcatgcacaaagccaaaccactgataagagataaagcagtctgaagcctgctgcttcagccagcacagcacaccacacacgctcgcactttcaaaagcaatgtgatttctatggttcttaaaagctttcttcataagggagtccctgaaatttctcaaggcaggtttgaatggcaaagggaaaataattacttgtgggaggtcctccttttgagtattgttagagcatacatgtaaaagaaaataacctttttggggcaactcatgctcacacatgctgttttctttggttctccccctaccttccttttgtagatattgacagaataggaggaaatgagcatccttatttgagaaagagcaagaatgtcatgagcccttgatgcaatagtaagtgtgatgtcatcatacagtgttaatgatgctatcaaatccatcaataaacagtctcaaaccttccaacaacagtgctcactgctgctcctcaacttcagcccagcaagcagtaatatcatcacccattttgagatatgcaggtggaatagaacaaagaaacagccactgtaatcgagaagcatgtttactgtctaaatccacctgttgcagtaggaagccagagtggggttccaaatgcctcattaagtatgtggacagcctcactagtaagtgagtgaatttggcttcatcactgaacattagctaaggtcagcttaataacacaaatatgaggccgacttctttgcgagaagagaaaagaaaacatctgcttgatttaaaatccaccccacatgcctagagttgtctaatagtccctcactttccaatggcttcacatcctacttctacatttggggttttttggtgaaatcagagatagctcaggatttcataaaacgagaaactccaaactggtctattaggttccatgggaacacttgtagccaaaggattgtctgagggcaggaagacgacacttgtcaacaaggaagacagtgtttctttagttcccatattcatctaattcatggggttctaacattttggggggccatagattcttttgacaatctgagccaatctatgaaacttctccccaaaaagaaccaccccacaaaatcttgcaaaacgtaagagattttcctggatctgaagctacccgaagacatgggaagagttgtattctattattcaattttaagaatatttattaatattcactgagctattgctagccactgtgctaaacattttacatacattctcctatttcatcctcaaaacaatcctttgagttgggttttaatatagttccaatattcggatgtgaaaactgaggcttatagtggctaagaaacttgcccaaagccactacctagaaaatggcagagctggaatgtaggtttaactcctgaccactatgctataaagtcaccacatgtcaaactaattttcaagttgttgggacatgtcccctactaggttttaaactagatcttccttggtagatgaagctatagaacttctattttccctgctttctgtagtctctcacagtgacagcatctatactaaagtatagatacctaaggggaaaatatagaaagcctgcctgaataatagaatctagaacaacaacaaaaatattaattttttctgtgtatgcttaggtcaagcttaaaaaaaaaaaaaaaa

SEQ ID NO: 2096 - DNA, 2146 bp, Homo sapiens
atgggttcagactttatgccctgaaaagatccttccagccctggccatcttggacttctggagctaccctggctcacaggggtcttgttgccctgggtgtccccagttcttgaaaagaatcagcctgggaggggccacaccctgaccatccccctttatcccttctgagatgtttgttaggaagtctgggtccaggggatatcatttcttgttccatccatgcaggggttgcttacctcgggtaggaaaccctcaggcggtggcaggtgcacaggtaggggaggatggagagggcagtggtgcctgaagccctggatgggcggagctgaccccccaacaccaactctctcatgcctgctcctccctgtccccccagagctgcctgatcattgctacagaatgaactctagcccagctgggaccccaagtccacagccctccagggccaatgggaacatcaacctggggccttcagccaacccaaatgcccagcccacggacttcgacttcctcaaagtcatcggcaaagggaactacgggaaggtcctactggccaagcgcaagtctgatggggcgttctatgcagtgaaggtactacagaaaaagtccatcttaaagaagaaagagcagagccacatcatggcagagcgcagtgtgcttctgaagaacgtgcggcaccccttcctcgtgggcctgcgctactccttccagacacctgagaagctctacttcgtgctcgactatgtcaacgggggagagctcttcttccacctgcagcgggagcgccggttcctggagccccgggccaggttctacgctgctgaggtggccagcgccattggctacctgcactccctcaacatcatttacagggatctgaaaccagagaacattctcttggactgccagggacacgtggtgctgacggattttggcctctgcaaggaaggtgtagagcctgaagacaccacatccacattctgtggtacccctgagtacttggcacctgaagtgcttcggaaagagccttatgatcgagcagtggactggtggtgcttgggggcagtcctctacgagatgctccatggcctgccgcccttctacagccaagatgtatcccagatgtatgagaacattctgcaccagccgctacagatccccggaggccggacagtggccgcctgtgacctcctgcaaagccttctccacaaggaccagaggcagcggctgggctccaaagcagactttcttgagattaagaaccatgtattcttcagccccataaactgggatgacctgtaccacaagaggctaactccacccttcaacccaaatgtgacaggacctgctgacttgaagcattttgacccagagttcacccaggaagctgtgtccaagtccattggctgtacccctgacactgtggccagcagctctggggcctcaagtgcattcctgggattttcttatgcgccagaggatgatgacatcttggattgctagaagagaaggacctgtgaaactactgaggccagctggtattagtaaggaattaccttcagctgctaggaagagcgactcaaactaacaatggcttcaacgagaagcaggtttattttttccagcacataaaagaaaaataatgtttcggagtccaggactggcaggacaggtcatcagatactcagaggctgtatctctgccctgccaaccttgacaaatggcttccaatgttaggtttgctacaagatggttactggagctctagctgcctattttgtgtttagggaagggaaaatggaggaaaggggagaagagcaaagggcgcttttaaagagctttcccaaaagctccacccaatgacttctgcttccatctcactaaccacccacccctacctggaatggaggctgggagatgtggcttatttgctgggtacgtgactatccctaataacaaaggggttctgacactaagacattaggggagaatgttgggtaggcagccagcactcttttaccagagggcctcctggtgtttggattttgatctcaatgtgtaaaatgacagagatgtaacaagctcatagggtatcaatatctcttattgttctatgttgaaaaaaaaaaaaaaaaaaaaaaaaaaa

SEQ ID NO: 2097 - DNA, 1862 bp, Homo sapiens
gcttgacaagtcaggattgtgcctccagtcagaaggaccatgaagagagagaagagggcagagccgtgcatggggctgctccccaggacctgagcaggaacctggagttttcagagctgcctgatcattgctacagaatgaactctagcccagctgggaccccaagtccacagccctccagggccaatgggaacatcaacctggggccttcagccaacccaaatgcccagcccacggacttcgacttcctcaaagtcatcggcaaagggaactacgggaaggtcctactggccaagcgcaagtctgatggggcgttctatgcagtgaaggtactacagaaaaagtccatcttaaagaagaaagagcagagccacatcatggcagagcgcagtgtgcttctgaagaacgtgcggcaccccttcctcgtgggcctgcgctactccttccagacacctgagaagctctacttcgtgctcgactatgtcaacgggggagagctcttcttccacctgcagcgggagcgccggttcctggagccccgggccaggttctacgctgctgaggtggccagcgccattggctacctgcactccctcaacatcatttacagggatctgaaaccagagaacattctcttggactgccagggacacgtggtgctgacggattttggcctctgcaaggaaggtgtagagcctgaagacaccacatccacattctgtggtacccctgagtacttggcacctgaagtgcttcggaaagagccttatgatcgagcagtggactggtggtgcttgggggcagtcctctacgagatgctccatggcctgccgcccttctacagccaagatgtatcccagatgtatgagaacattctgcaccagccgctacagatccccggaggccggacagtggccgcctgtgacctcctgcaaagccttctccacaaggaccagaggcagcggctgggctccaaagcagactttcttgagattaagaaccatgtattcttcagccccataaactgggatgacctgtaccacaagaggctaactccacccttcaacccaaatgtgacaggacctgctgacttgaagcattttgacccagagttcacccaggaagctgtgtccaagtccattggctgtacccctgacactgtggccagcagctctggggcctcaagtgcattcctgggattttcttatgcgccagaggatgatgacatcttggattgctagaagagaaggacctgtgaaactactgaggccagctggtattagtaaggaattaccttcagctgctaggaagagcgactcaaactaacaatggcttcaacgagaagcaggtttattttttccagcacataaaagaaaaataatgtttcggagtccaggactggcaggacaggtcatcagatactcagaggctgtatctctgccctgccaaccttgacaaatggcttccaatgttaggtttgctacaagatggttactggagctctagctgcctattttgtgtttagggaagggaaaatggaggaaaggggagaagagcaaagggcgcttttaaagagctttcccaaaagctccacccaatgacttctgcttccatctcactaaccacccacccctacctggaatggaggctgggagatgtggcttatttgctgggtacgtgactatccctaataacaaaggggttctgacactaagacattaggggagaatgttgggtaggcagccagcactcttttaccagagggcctcctggtgtttggattttgatctcaatgtgtaaaatgacagagatgtaacaagctcatagggtatcaatatctcttattgttctatgttgaaaaa

SEQ ID NO: 2098 - DNA, 4155 bp, Homo sapiens
gggagctggtggcgcggcgcaggtcccggccgagtgtggcgcagcagtggcggcgcttcccattcgccatgcgccgggggtgggtgcccgaaggttgcatgatggaatttgaacattacttcaagaggttttgtattttggattagttaattgggtttgtcctctgctgactgtttcttcggatgcattttttggtgtgctcttgagggattaaatgcaaagagatcacaccatggactacaaggaaagctgcccaagtgtaagcattcccagctccgatgaacacagagagaaaaagaagaggtttactgtttataaagttctggtttcagtgggaagaagtgaatggtttgtcttcaggagatatgcagagtttgataaactttataacactttaaaaaaacagtttcctgctatggccctgaagattcctgccaagagaatatttggtgataattttgatccagattttattaaacaaagacgagcaggactaaacgaattcattcagaacctagttaggtatccagaactttataaccatccagatgtcagagcattccttcaaatggacagtccaaaacaccagtcagatccatctgaagatgaggatgaaagaagttctcagaagctacactctacctcacagaacatcaacctgggaccgtctggaaatcctcatgccaaaccaactgactttgatttcttaaaagttattggaaaaggcagctttggcaaggttcttcttgcaaaacggaaactggatggaaaattttatgctgtcaaagtgttacagaaaaaaatagttctcaacagaaaagagcaaaaacatattatggctgaacgtaatgtgctcttgaaaaatgtgaaacatccgtttttggttggattgcattattccttccaaacaactgaaaagctttattttgttctggattttgttaatggaggggagctttttttccacttacaaagagaacggtcctttcctgagcacagagctaggttttacgctgctgaaattgctagtgcattgggttacttacattccatcaaaatagtatacagagacttgaaaccagaaaatattcttttggattcagtaggacatgttgtcttaacagattttgggctttgtaaagaaggaattgctatttctgacaccactaccacattttgtgggacaccagagtatcttgcacctgaagtaattagaaaacagccctatgacaatactgtagattggtggtgccttggggctgttctgtatgaaatgctgtatggattgcctcctttttattgccgagatgttgctgaaatgtatgacaatatccttcacaaacccctaagtttgaggccaggagtgagtcttacagcctggtccattctggaagaactcctagaaaaagacaggcaaaatcgacttggtgccaaggaagactttcttgaaattcagaatcatcctttttttgaatcactcagctgggctgaccttgtacaaaagaagattccaccaccatttaatcctaatgtggctggaccagatgatatcagaaactttgacacagcatttacagaagaaacagttccatattctgtgtgtgtatcttctgactattctatagtgaatgccagtgtattggaggcagatgatgcattcgttggtttctcttatgcacctccttcagaagacttatttttgtgagcagtttgccattcagaaaccattgagcaaaataagtctatagatgggactgaaacttctatttgtgtgaatatattcaaatatgtataactagtgcctcatttttatatgtaatgatgaaaactatgaaaaaatgtattttcttctatgtgcaagaaaaatagggcatttcaaagagctgttttgattaaaatttatattcttgtttaataagcttatttttaaacaatttaaaagctattattcttagcattaacctatttttaaagaaaccttttttgctattgactgttttttccctctaagtttacactaacatctacccaagatagactgttttttaacagtcaatttcagttcagctaacatatattaatacctttgtaactctttgctatggcttttgttatcacaccaaaactatgcaattggtacatggttgtttaagaagaaaccgtatttttccatgataaatcactgtttgaaatatttggttcatggtatgatcgaaatgtaaaagcataattaacacattggctgctagttaacaattggaataactttattctgcagatcatttaagaagtaacaggccgggcgcggtggctcacgcctgtaatcccagcactttgggaggctgaggcgggcagatcacctgaggtcaggagttggagaccagcctgaccaacatggacaaaccccgtctctactaaaaatacaaaattggcagggtgtggtggcacatgcctataatcccagctacttgggaggctaaggcaggagaatcgcttgaacccgggaggcggaggttgcagtgagccgagatcgcaccattgcactcctgcctgggcaacaagagtgaaactccatctccaaaaaaaaaaagaaaaagtaacaaaaggaaattatttgtttttgaaataccagttcaactttgtggattatttttcctctgaaggaaaagaaaaggcttaatggttaggatttttaagtattcccaaagatctgaagggtaataaaatgtactggattttttaaggtggtaccaaaaatgaatgtctgtcatatatttatattacaaatacattatatttatgttctattcatcttttgaatgtttagtatgctattaagtcattctgaatctttgtatttgcttttgcaaataggtatttcaaagctcttttcctaactggttaagtaaaataaaaaattgagctttctagaatatttgcctaattgggaattaaaaagtaaaataataggccaggcatggtggctcatgcctataagcaccctgggaggccgaggcaggcagattatttgagctcaggagtttgagaccatcctgggcaacatggcgaaaccctatctctacaaaaaatacaaaaattagccagacatggtggcacatgcctttagtcccagctactctggaggctgaagttggaggatggcttgagcccacgagatggaagttgcagtgaactgaaattgtgccactgcacttttcagcctgggtgccacagcgagaccctagttaagagaaaaaaaaagtaaaaacaaattgtgggtcaaagtaaatgtatacagttttattacaatgtaacaaaagttgaaaatcaggcagatgtgtattcagtatccaattcaatatatcttagaaaaagcacaggaaacagaccttaaaattgtaacctaccaactaacttacatgcttataaaagtaaaggagaataactggccgggcacggtggctcatgcctataaaattccagcactttgggaggccaaggcaggaggatcacttgagcctatgagttcaagaccagcctaggcaatgtagtgacacctcatttctatttattttaaaaaaaagagagagtaactacagaagaactttaaaaaataaaaaataagcttaccttggattcttggcttagagtagaggttttttttaagttatggaggaaacatttttgtaaaagtttaatgacccactttagatgctccaagaacaagcatcccttccatgtatgtcttgagaaagaaatcacagaagcatttctcaccaatactctttggcttaaaatgttcagcagaattgggcagtgggggtgacttttcttatattaataatatttacatccaatacactgaatcttcctttagaggtaagactttaatatctatactgtaaatatttggtttatttggcactactgtaagttttgtttttcacaaagctcttattatgaagcaaaataaaaattctagtttcttgtatgattttttgtactcattcattcctgttaagctgccaaaaattaaagtgcaatattgtatatttttaagaacaaatttaaaatagaattttgatgtttctcagatcacaagaaatacaaatctatatagtataataaaatcagcaaaaagatcaaaaaaaaaaa

SEQ ID NO: 2099 - DNA, 4241 bp, Homo sapiens
gggatccggcgccttccccggctgtcctcggcctcccgcgcgctccgcgggaggagccgccagcggccgtgacgcgtcaaggaggaaacgccggcgcccggcggccctgccgggaaggaggaagcgcagtgcgttcggctccgcgcccgccgcgccgggagcagcaccgcggggccaggttgcatgatggaatttgaacattacttcaagaggttttgtattttggattagttaattgggtttgtcctctgctgactgtttcttcggatgcattttttggtgtgctcttgagggattaaatgcaaagagatcacaccatggactacaaggaaagctgcccaagtgtaagcattcccagctccgatgaacacagagagaaaaagaagaggtttactgtttataaagttctggtttcagtgggaagaagtgaatggtttgtcttcaggagatatgcagagtttgataaactttataacactttaaaaaaacagtttcctgctatggccctgaagattcctgccaagagaatatttggtgataattttgatccagattttattaaacaaagacgagcaggactaaacgaattcattcagaacctagttaggtatccagaactttataaccatccagatgtcagagcattccttcaaatggacagtccaaaacaccagtcagatccatctgaagatgaggatgaaagaagttctcagaagctacactctacctcacagaacatcaacctgggaccgtctggaaatcctcatgccaaaccaactgactttgatttcttaaaagttattggaaaaggcagctttggcaaggttcttcttgcaaaacggaaactggatggaaaattttatgctgtcaaagtgttacagaaaaaaatagttctcaacagaaaagagcaaaaacatattatggctgaacgtaatgtgctcttgaaaaatgtgaaacatccgtttttggttggattgcattattccttccaaacaactgaaaagctttattttgttctggattttgttaatggaggggagctttttttccacttacaaagagaacggtcctttcctgagcacagagctaggttttacgctgctgaaattgctagtgcattgggttacttacattccatcaaaatagtatacagagacttgaaaccagaaaatattcttttggattcagtaggacatgttgtcttaacagattttgggctttgtaaagaaggaattgctatttctgacaccactaccacattttgtgggacaccagagtatcttgcacctgaagtaattagaaaacagccctatgacaatactgtagattggtggtgccttggggctgttctgtatgaaatgctgtatggattgcctcctttttattgccgagatgttgctgaaatgtatgacaatatccttcacaaacccctaagtttgaggccaggagtgagtcttacagcctggtccattctggaagaactcctagaaaaagacaggcaaaatcgacttggtgccaaggaagactttcttgaaattcagaatcatcctttttttgaatcactcagctgggctgaccttgtacaaaagaagattccaccaccatttaatcctaatgtggctggaccagatgatatcagaaactttgacacagcatttacagaagaaacagttccatattctgtgtgtgtatcttctgactattctatagtgaatgccagtgtattggaggcagatgatgcattcgttggtttctcttatgcacctccttcagaagacttatttttgtgagcagtttgccattcagaaaccattgagcaaaataagtctatagatgggactgaaacttctatttgtgtgaatatattcaaatatgtataactagtgcctcatttttatatgtaatgatgaaaactatgaaaaaatgtattttcttctatgtgcaagaaaaatagggcatttcaaagagctgttttgattaaaatttatattcttgtttaataagcttatttttaaacaatttaaaagctattattcttagcattaacctatttttaaagaaaccttttttgctattgactgttttttccctctaagtttacactaacatctacccaagatagactgttttttaacagtcaatttcagttcagctaacatatattaatacctttgtaactctttgctatggcttttgttatcacaccaaaactatgcaattggtacatggttgtttaagaagaaaccgtatttttccatgataaatcactgtttgaaatatttggttcatggtatgatcgaaatgtaaaagcataattaacacattggctgctagttaacaattggaataactttattctgcagatcatttaagaagtaacaggccgggcgcggtggctcacgcctgtaatcccagcactttgggaggctgaggcgggcagatcacctgaggtcaggagttggagaccagcctgaccaacatggacaaaccccgtctctactaaaaatacaaaattggcagggtgtggtggcacatgcctataatcccagctacttgggaggctaaggcaggagaatcgcttgaacccgggaggcggaggttgcagtgagccgagatcgcaccattgcactcctgcctgggcaacaagagtgaaactccatctccaaaaaaaaaaagaaaaagtaacaaaaggaaattatttgtttttgaaataccagttcaactttgtggattatttttcctctgaaggaaaagaaaaggcttaatggttaggatttttaagtattcccaaagatctgaagggtaataaaatgtactggattttttaaggtggtaccaaaaatgaatgtctgtcatatatttatattacaaatacattatatttatgttctattcatcttttgaatgtttagtatgctattaagtcattctgaatctttgtatttgcttttgcaaataggtatttcaaagctcttttcctaactggttaagtaaaataaaaaattgagctttctagaatatttgcctaattgggaattaaaaagtaaaataataggccaggcatggtggctcatgcctataagcaccctgggaggccgaggcaggcagattatttgagctcaggagtttgagaccatcctgggcaacatggcgaaaccctatctctacaaaaaatacaaaaattagccagacatggtggcacatgcctttagtcccagctactctggaggctgaagttggaggatggcttgagcccacgagatggaagttgcagtgaactgaaattgtgccactgcacttttcagcctgggtgccacagcgagaccctagttaagagaaaaaaaaagtaaaaacaaattgtgggtcaaagtaaatgtatacagttttattacaatgtaacaaaagttgaaaatcaggcagatgtgtattcagtatccaattcaatatatcttagaaaaagcacaggaaacagaccttaaaattgtaacctaccaactaacttacatgcttataaaagtaaaggagaataactggccgggcacggtggctcatgcctataaaattccagcactttgggaggccaaggcaggaggatcacttgagcctatgagttcaagaccagcctaggcaatgtagtgacacctcatttctatttattttaaaaaaaagagagagtaactacagaagaactttaaaaaataaaaaataagcttaccttggattcttggcttagagtagaggttttttttaagttatggaggaaacatttttgtaaaagtttaatgacccactttagatgctccaagaacaagcatcccttccatgtatgtcttgagaaagaaatcacagaagcatttctcaccaatactctttggcttaaaatgttcagcagaattgggcagtgggggtgacttttcttatattaataatatttacatccaatacactgaatcttcctttagaggtaagactttaatatctatactgtaaatatttggtttatttggcactactgtaagttttgtttttcacaaagctcttattatgaagcaaaataaaaattctagtttcttgtatgattttttgtactcattcattcctgttaagctgccaaaaattaaagtgcaatattgtatatttttaagaacaaatttaaaatagaattttgatgtttctcagatcacaagaaatacaaatctatatagtataataaaatcagcaaaaagatcaaaaaaaaaaaa

SEQ ID NO: 2100 - DNA, 1563 bp, Homo sapiens
agttccaggcgacggcggacggtggtacggtcctggagggcccagtgcgcggggctagccgtggctggagagcttcgaagagccttgaaatgtgaggaggaggaagatagctgttgcagaagtagtggccaaggcaaaggatggccaaggaaagatgcctgaaaaagtcctttcaagatagtcttgaagacataaagaagcgaatgaaagagaaaaggaataaaaacttggcagagattggcaaacgcaggtcttttatagctgcaccatgccaaataatcaccaacacttctacactgctgaaaaattaccaagacaacaacaaaatgttagttttagctttggaaaatgaaaaatccaaagtgaaagaagcccaagatatcatcctacagctgagaaaagaatgttactatctcacatgtcagctatatgcattgaaaggaaaacttacatcacaacaaacagtagaacctgctcagaaccaggaaatatgttcctctggaatggaccccaatagtgatgacagctccagaaatttatttgtgaaggatttaccgcaaattcctcttgaagaaactgaacttccaggacaaggagaatcatttcaaatagaagctacaccacctgaaactcagcagtcacctcatcttagcctgaaggatatcaccaatgtctccttgtatcctgttgtgaaaatcagaagactttctctttctccaaaaaagaataaagcaagcccagcagtggctctgcctaaacgtaggtgcacagccagcgtgaactataaggagcccaccctcgcttcgaaactgagaagaggggacccttttacagatttgtgttttttgaattctcctattttcaagcagaaaaaggatttgagacgttctaaaaaaagagccctggaggtatcacctgccaaagaagcaatttttattttatattatgttcgagaatttgtttcgagattcccagactgtaggaaatgtaaacttgaaacccacatctgcttgaggtaaagtccacgggcttcacatccttagaaaacttttttagtccatgcattcactaatgtatgcagacctttaatagattctagctttatgtgttgggggagagatggaggggtgttgacagtctgtttcactcagcctacatacataataaaatctaagccctttaattagagatagcaactttcccagggtgaccgaggaatcagtacgtgttgaacccctcttttaagtttccttttggttgtgtcacttggagattgccttttctttcttgtaagctcagctgtgtcctcaaatatattgcattttacccagcatttccaggtgttttcaggggtcaaagtttttaagttatcttagtctttgatattgtgtaagcgaaattctccaatcccatctcctagatgatttttttttaaatcacaaaatgtgattatgcttaacagctgtttcctgtttctcttaaaataaaatccatttcctatttctcttaaaataaaatccattattcttaaaacaaaaaaaaaaaaaaaaaaaaaaaaaaaaa

SEQ ID NO: 2101 - DNA, 1956 bp, Homo sapiens
agttccaggcgacggcggacggtggtacggtcctggagggcccagtgcgcggggctagccgtggctggagagcttcgaagagccttgaaatgtgaggaggaggaagatagctgttgcagaagtagtggccaaggcaaaggatggccaaggaaagatgcctgaaaaagtcctttcaagatagtcttgaagacataaagaagcgaatgaaagagaaaaggaataaaaacttggcagagattggcaaacgcaggtcttttatagctgcaccatgccaaataatcaccaacacttctacactgctgaaaaattaccaagacaacaacaaaatgttagttttagctttggaaaatgaaaaatccaaagtgaaagaagcccaagatatcatcctacagctgagaaaagaatgttactatctcacatgtcagctatatgcattgaaaggaaaacttacatcacaacaaacagtagaacctgctcagaaccaggaaatatgttcctctggaatggaccccaatagtgatgacagctccagaaatttatttgtgaaggatttaccgcaaattcctcttgaagaaactgaacttccaggacaaggagaatcatttcaaatagaagatcagatacctactattcctcaagacacactgggagttgattttgattcaggtgaagctaagtctactgataatgtcttacctagaactgtatctgttcgtagcagtttaaagaaacattgtaacagtatatgtcagtttgatagcttggatgattttgaaaccagtcatttggcagggaagtcttttgaattcgaaagagttggatttttagacccactagtaaacatgcacatacctgaaaatgtacaacacaatgcttgtcaatggagcaaggaccaagttaacttatcaccaaagctgattcagccaggaacgtttactaaaacaaaagaagacattttagaatctaaatctgaacaaactaaaagtaagcaaagagatacacaagaaagaaaaagagaagagaaaagaaaagctaacaggagaaaatcaaaacgtatgtcaaaatataaagagaataaaagcgaaaataaaaaaactgttccccaaaaaaaaatgcacaaatctgtcagttccaatgatgcttacaattttaatttggaagagggtgttcatcttactcctttccgacaaaaagtgagcaatgactctaatagagaagaaaacaacgagtctgaagtgagcctctgtgaatcaagtggttcaggagatgattccgatgacctctatttgcccacttgcaagtacattcagaatcccacgagcaattcagatagaccagtcaccaggcctctagctaaaagagcactgaaatacacagatgaaaaagagacggagggttctaagccaacaaaaactcctaccactacaccacctgaaactcagcagtcacctcatcttagcctgaaggatatcaccaatgtctccttgtatcctgttgtgaaaatcagaagactttctctttctccaaaaaagaataaagcaagcccagcagtggctctgcctaaacgtaggtgcacagccagcgtgaactataaggagcccaccctcgcttcgaaactgagaagaggggacccttttacagatttgtgttttttgaattctcctattttcaagcagaaaaaggatttgagacgttctaaaaaaagtatgaaacaaatacaatgaaggtttcgttggatattgtttaaattcaatctacacctctttctgttgcttcaggagaggatctgtaagagtacacaaacagagtgagccattgccatagaatattctcttgacaggaccctagctcataaacatttcttcagaactatacttcaaatgggatgctttgtattaaaactttaataaatttaatttattttttcttttgaatataaataaaaaaaaaaaaaaa

SEQ ID NO: 2102 - DNA, 2358 bp, Homo sapiens
gcagaagggaagcaactccgggcgcctttcttttgcgcaggcgtcgcgccctggggccggggccgggcggcaccgcggtgcgcaagcgcaaccgtcggtgggtcggggatcggtcgcctgagaggtatcacctcttctgggctcaagatggacaacaagaagcgcctggcctacgccatcatccagttcctgcatgaccagctccggcacgggggcctctcgtccgatgctcaggagagcttggaagtcgccatccagtgcctggagactgcgtttggggtgacggtagaagacagtgaccttgcgctccctcagactctgccggagatatttgaagcggctgccacgggcaaggagatgccgcaggacctgaggagccccgcgcgaaccccgccttccgaggaggactcagcagaggcagagcgcctcaaaaccgaaggaaacgagcagatgaaagtggaaaactttgaagctgccgtgcatttctacggaaaagccatcgagctcaacccagccaacgccgtctatttctgcaacagagccgcagcctacagcaaactcggcaactacgcaggcgcggtgcaggactgtgagcgggccatctgcattgacccggcctacagcaaggcctacggcaggatgggcctggcgctctccagcctcaacaagcacgtggaggccgtggcttactacaagaaggctctggagctggaccccgacaacgagacatacaagtccaacctcaagatagcggagctgaagctgcgggaggcccccagccccacgggaggcgtgggcagcttcgacatcgccggcctgctgaacaaccctggcttcatgagcatggcttcgaacctaatgaacaatccccagattcagcagctcatgtccggcatgatttcgggtggcaacaaccccttgggaactcccggcaccagcccctcgcagaacgacctggccagcctcatccaggcgggccagcagtttgcccagcagatgcagcagcagaacccagagttgatagagcagctcaggagccagatccggagtcggacgcccagcgccagcaacgacgaccagcaggagtgacgctgcctgctcccggtgtgaccgcgtccttccctggccgacccgaaggaagccttctggttgtctgccacttcctcctgttggactgcctgagagaggggaagagagagacctcggacctgcatgtcaagatggattttccccttttatctctgccctcctccactccctttttgtaactcccttacagcccccagacccttcttgaaacgagagccagcaagctgagcacagaccagcagcgacctcccttccagcccccagaaagctcggtcacttgagtgttttctagaatcctggggtgctcccgggccgctctcagagaagtggcaggtttcacgttcagccgtgtggcggatcgtgtggcttccaaagccttttacagcccccgccccccatcccgtggtctgtctgcaggaactctcccgtctgtgagaagcctctttccgagtcgacctcccggccaccccggccctgtgcctgctcggaagagctcactgccagctgcggcctgggcaccgcgggccatgtgtgtttgcatgaggaactctttagtggcagacacctaagagacggctgcggtcaccccacgcctccgcggctcaggagccgtcctgggtgcataggaccagtttctgtgacttttctccagttgggcatgttgacagacatgtttcccctcctcccaccctcattttctggtcctcgcgactgagagccaggggcgacatcatgaccttctgtcccggccgccttagccccgggcacagggaaggcagctgggccgtttctgtctgtgtcccatcctgctgtccttctgtcctggatgtttcatgggcccggggccccccagggaagcttacccctcctgtgctgggtggaggccacgggacacctcaggtgccacccaccttggccctaaaacagccaccaggaaagcagccggagagccggacagcaggcagcctgtctgggttcctgaggcctgggggtggcagacgagcccacggcgccgtggtcccagcagcagggttgtcagtcggagcatcctggggctccctggctcctggccgtctgtgaggtaggcgcagtaccgtgtatcgtaggtagcagtaggaacgggggccgccgcggccctgcagccgctcatggcggtgaggtgtgtgccaagcccacccggggtgcagggcgtgacgtgtggggaataaataggcgttgtgacctctaaaaaaaaaaaaaaaaaaaaaaaaaaaaaaaaaaaaaaaaaaa

SEQ ID NO: 2103 - DNA, 6021 bp, Homo sapiens
gcgccgccgggacgggcacgggcgcgcgggctccggcgggcgccggctgccttcctccgtcgctcgctgtctctcccggccgcattctcctccgctgcggggccgagctctccccagcgctcgcaggaaggaagaagggagccgaggacgccgagaagttcccgcggcagccgcggatcccggccaaggcggaggctgcggctccgacggggcaggagcgcgatccacggcgaggggcgtacggccaaagggtccgcggcgtggagcgctcggaccttccgctctcccccgggcgtgggccgggaccccatgagacgcgcccacgaggggcgcgagattcctagcttgggcggcgctaggcggagggaggtgttgcagccgccggagccagagagctgccggcaggaggcggcggcggcaagaacttgaacttggcgtcgggagcgggcgccccggacgccccccgccggggccggggcgccgagggacctgcgccgcagcgctgccccccgaatggccgcggcggcggaccgggctcccgcgccgcggccctaggcggcctctcgccatggccaagtggctaaacaagtacttcagcttgggcaacagcaagaccaagagccccccgcagccgccgcggccagactaccgcgagcagcggcgccgaggcgagcggccttcgcagcccccccaggccgtgccgcaggcctcctccgccgcctcggcgtcctgcggtccggccaccgcctcctgcttctcagcctcttcgggctcgctgcccgacgacagcggcagcaccagcgacctcatccgcgcctaccgcgcgcagaaggagcgagacttcgaggacccctacaacgggcctggctcgtcgctgcgcaaactgcgcgccatgtgccgcctggactactgcggcggcagcggggagccaggcggggtccagcgcgccttctcggcctcgtccgcgtcgggcgccgcgggctgttgctgcgcctcctcgggcgcgggggccgccgcgtcctcgtcctcgtcctccggctctccgcatctctaccgcagcagcagcgagcggcggcccgccacgccggccgaggtgcgctacatctcccccaagcaccgcctcatcaaagtggagagcgccgcgggcggtggggccggggaccccctggggggcgcctgcgcgggcggccgcacctggagcccgacggcctgcggaggcaagaaactgctcaacaagtgcgccgcctcagccgcggaggagagcggggccggcaagaaggacaaggtgaccatagccgatgactactcagatccctttgatgccaagaatgatctcaagagcaaagcaggaaagggggagagtgctggctacatggagccctatgaggcacagaggatcatgacagaatttcagaggcaggaaagtgtccggtcccagcataaaggtatccagttatatgacaccccttacgaacctgaaggccaaagtgttgactcagactcggagagcacagtcagcccccgactgcgggagagcaagctgccccaggatgacgacaggcccgccgatgagtacgaccagccttgggagtggaaccgggtcaccatcccagccctggcagcacagtttaatggcaacgagaagcggcagtcatccccctcaccttcgcgggaccggcggcgccagcttcgtgcccctggagggggctttaagcctatcaaacatgggagccctgagttctgcgggatcctaggagaaagggtggatcctgccgtccccctggagaagcaaatatggtatcacggagccatcagcagaggagacgccgagaacctgctgcgactctgcaaggagtgtagctaccttgtccggaacagccagaccagcaagcatgactactccctctccctgaggagcaaccagggttttatgcacatgaaactggccaaaaccaaagagaaatacgttctgggtcagaacagccctccgttcgacagtgtcccggaagtcatccactactacaccaccagaaagctacccatcaaaggggctgagcacttgtccctcctctatcccgtggctgtgaggaccctgtgagcggaccagacctgccctgctctgtgacagagcctgagacttggaggtgccagaggccccccaccaaccagcccagccactgttgctggctgtgtcgtttgtgttgtgtgtatggtactagcacaccactgcatgtctctagaatgctgttgccacttacgggggctggagaaggcctggataaagacagaagggcggcaacacaccaccccagcccccacccccaccctctccttgagtttctgtgaattaaaatatttgcaaatccaaagagatgccttccaggatgaacaaaggcagaccagctccgaggggcggggtagggtggggcgggagctccctggctgacatctctttgttctccagctgtctcaaattcacacctctgtacagggcaaagttttcccacaggagcccccctactgatgctgggagccaaatgctggtgctttgagagtcccggaggccccggggttcccgccccgctggtgtgtatatgtgtgtctgtgtgagtgtgtgtgtgagtacagatgtgagaaggtggtcacacacagatgggtaagcccactgatctacttgtagtcactcagtgtaatcattaggctatcttcaaggaatcattgtgcagtcaaaaagaggattcaattatttatgaatagggtgtgtaaataaaatagtcatttaatatatagccttatccttttttgatatactgcagagggtctctgagggggcagttctggtttcactcccagagcaaggcgtgtctcctctgggcttgctgctgtggcaggccccagggaggggagggaggccgaggcctcagctccagccctcagcagctctggacacaagagccgtctgctctgacaactgggctgaggcagtcggtagcactctgggagtcaacccagagctcagagttcaggcttcagcagtggacatagtcaggagcctccagtgttgaccaaaaaaccagtctttccctcctgcagtgggacgtctgtgttgacacccccccaacccctggacacagcacccagctggctacaaagggctctctccccactatctgttagcaccacctgggaggtatttggcatgtagggaaagggagacagagaaggaacgtcatttgcccaaagccacacagctcaccagcagcagagcggttctgcagccaatgctctttcgttggttctgcatggccttgctgtcaccctgcccatggaggagggagaatcctgacctcccagggacatagagccctcagtggtccacactgcttccacacacaagaacacctacacacacacacacacacacacacacagccctcagtggtccacactgcttccacacacaagaacacctacacacacacacacacacacacacagccctcagtggtccacactgcttccacacacaagaacacctacacacgcacacgcacacgcgacctctctcttgcttgccatagcagggtcctcccacacaggccaggcagccccgatgaggctaagagtttctcagctctcctgctttttccacccacccagtagcatgaagatgtggctgccctctcctgaatgagatacaagggttccagagccttcgccaggcaccagctggtctgaatgaactagaagtttgacgactgtcatccctggcccacctgggcagagcacaaggggccgagtttgaatgtcatcagcaggttcagacatcagcgctgctcatgtctttagagactgtttggaggtggttccagctcactgttcacatgcagagacacaggcccggagaaggaggactcgccaaggccacgtgtcgagctgggactgagccctgcccctttaggtagctgcgtggacttcagcggtttgtgcaaagccctgcccttggtgacccgcctttagtgaccagtctgcctcttgggtcttcctcccaggccttgtctggcacgtccacgtggcccagccctcatagagaccacgctggctgtggcctgggtttaatctcttaaagaagccaatcctttccttgcctgtttggcatttcctaaaacatccctcaatgagggaggaaggcagggacaccctggaacgattcgtgctttcctttgggggagtgggaaggtaggtgggaaatgacaagatgagtgaggagttggcacttggccaaacagaggagcctggaccccaaggcttattctcagaggaggcccaagagaggctgaggaagagggggaacaaccctccggcgggggaggagggtgagacctcacactggcaagttcaggtccagccacttcctgaggctgctgggtggggccgcacctcacggtccttccctgtagaccatcttcccgggcacattgctcctcagaaaaggctctgggagggtctcagtggaagctggcagctgtgccctctggccctgacttggcctcttagggtattcctgggaccctccctctgtccctggccttcgtcttcctgaagtttccctgggaggcccaacctcctgcccctctcagggacagaggccagcagaggagccagcttacaggatgggagctgctgaaaagaatttttttcccttaattttatgaacctctccctcttcttcctctaattgtgaccgtttcctgtgtcagcctgtattcatgttttcttggacatctaacaattgaaacagcttttccctttcagaaacactcacattcaggttactggctttggtttggtttttgttttgggtttgttttttttttttttcatctgctgccaattaattggggaaaaaattgagctggatttctttgagagaaaagaaaagctcctgccacacaacgtcgcgccctcggcattttgtctgagaacctccagcactagcggctgtttctgtgtctcccttctttgctggctttattattgaccataatgcctgcccacttgagcaactctgtccttgagcgctgaggagtcaagggcccttctggcagccccccaaacaggatggcgcccacagaaagaaaggaggctttgtaggggaagagggccccaccgcctgccagtcccgtcctgaagtcagaagaatggcccaggctgacaccctctcctggagagaggctcacagcgtagctgttcccaggaaaggggtgcaaagactccgaggcttcaggaggcaggccctgtcctcacagggcggctgtgggccggggcccctctgtggcctgagagtgagcaggagggaaacctgaagcagctacccgcaaggcgtccggtcaacagggtggagctgcaggctccctctgcccattcccagaaccagcggccccctttgtaagatgctgaacacgaagttccggtagctccccagacgctgtctcagaagtggtgatatcattgaccaagggcctggcaaggaccggcagccagggtccccatttgctcttgcagccctagggactgtgcaggtagaagccctgccagcagagcaggctggcgtttggtgttggcccacagacacccgtgaagggtcatggccgaatcaggcagctgtccagccaactgtctctccacccttccagaattggtgatcagcgaagaccaaattcggcaagccatccagagggagtgcagggcgcacagtcttagatgtgggcgcacctcccagaaccccacggggacttgttcacaggcgcgcttgcaggagggcaagccccttggtcctggaacacaggtgccccttggcctttccacctccctccttggggctgtttgcatccctgccaggagccttaaaccagccacctactgctgaagtctcttgtaacattccaaatctatgtgacacactgtataatgatgaatatttaatgtgaagctcttaatatactacaagtgtcttgttta

SEQ ID NO: 2104 - DNA, 1209 bp, Homo sapiens
atggagagcagaggcccactggctacctcgcgcctgctgctgttgctgctgttgctactactgcgtcacacccgccagggatgggccctgagacctgttctccccacccagagtgcccacgaccctccggctgtccacctcagcaatggcccaggacaagagcctatcgctgtcatgacctttgacctcaccaagatcacaaaaacctcctcctcctttgaggttcgaacctgggacccagagggagtgattttttatggggataccaaccctaaggatgactggtttatgctgggacttcgagacggcaggcctgagatccaactgcacaatcactgggcccagcttacggtgggtgctggaccacggctggatgatgggagatggcaccaggtggaagtcaagatggagggggactctgtgctgctggaggtggatggggaggaggtgctgcgcctgagacaggtctctgggcccctgaccagcaaacgccatcccatcatgaggattgcgcttggggggctgctcttccccgcttccaaccttcggttgccgctggttcctgccctggatggctgcctgcgccgggattcctggctggacaaacaggccgagatctcagcatctgcccccactagcctcagaagctgtgatgtagaatcaaatcccgggatatttctccctccagggactcaggcagaattcaatctccgagacattccccagcctcatgcagagccctgggccttctctttggacctgggactcaagcaggcagcaggctcaggccacctccttgctcttgggacaccagagaacccatcttggctcagtctccacctccaagatcaaaaggtggtgttgtcttctgggtcggggccagggctggatctgcccctggtcttgggactccctcttcagctgaagctgagtatgtccagggtggtcttgagccaagggtcgaagatgaaggcccttgccctgcctcccttaggcctggctcccctccttaacctctgggccaagcctcaagggcgtctcttcctgggggctttaccaggagaagactcttccacctctttttgcctgaatggcctttgggcacaaggtcagaggctggatgtggaccaggccctgaacagaagccatgagatctggactcacagctgcccccagagcccaggcaatggcactgacgcttcccattaa

SEQ ID NO: 2105 - DNA, 2394 bp, Homo sapiens
tgcttttgctgtgagcagccccaagcagctgggcgctccatcagaggcaactatgacttttgcaaagcaaacgtgcaaccccaagcagcggtctcccgggccggggctgcgcggccgccgctgtgctggcttttaacggtgggagggcaccatcctcttgctctgctctcgttctccagaaggctgtcccggggcccccactctccgtcccgctccggggacagtggctcgcctgctatgcgcggcagcccgcgccggggccggcaccagcagcgcccgggcggatgcagcgagcccacggaggggcatgcttccacgcaccaagtataaccgcttcaggaatgactcggtgacatcggtcgatgaccttctccacagcctgtcggtgagcggcggcggaggcaaggtttcggcggcgcgcgcgaccccggcggcggctccctacttggtgtccggcgaggcgctgcgcaaggcgcccgtcgatgggcccggcagcctgggccacctgctccacaaggtgtcccacctgaaactctccagctcgggcctccgcggcctgtcgtcggccgcccgggagcgggcgggcgcgcggctctcgggcagctgcagcgcgcccagcctggccgccccggacggcagtgcgccctcggcgccccgcgccccggccatgagcgccgccaggaagggccggcccggcgacgagccgctgcccaggccccctcggggggcgccgcacgccagcgaccaggtgctggggcccggagtcacctacgtggtcaagtacttggggtgcattgaagttctgcgctcaatgaggtctcttgacttcagtacaagaacacaaattaccagggaagccatcagccgcgtctgtgaagctgtgcctggtgcgaagggagccttcaagaagagaaagcctccaagcaaaatgctgtccagcatcttgggaaagagcaacctccagtttgcgggaatgagcatctctctgaccatctccacggccagtctgaacctgcgaactccggactccaaacagatcatagcgaatcaccacatgcggtccatctccttcgcctctgggggagacccggacacgactgactatgttgcatatgtgactaaggaccctgttaatcgcagagcttgtcacattttggaatgctgtgatgggctggcccaggatgtcatcggctccatcggacaagcctttgagctccggtttaagcaatatttacagtgtcctaccaagattcccgctctccatgatcgaatgcagagtctggatgagccatggacggaagaggagggagatggctcagaccacccatactacaacagcatcccaagcaagatgcctcctccagggggctttcttgatactagactgaaacccagaccccatgctcctgacacagcccagtttgcaggaaaagagcagacttattaccagggaagacacttaggagacacttttggcgaagactggcagcaaacacctttaaggcaagggtcctcggacatctacagcacgccagaagggaaactgcacgtggcccccacgggagaagcacccacctacgtcaacactcagcagatcccaccacaggcctggccggctgcggtcagcagtgctgagagcagcccaaggaaagacctctttgacatgaaaccttttgaagatgctctcaagaaccagcccttggggcccgtgttaagcaaggcagcctccgtggagtgcatcagccctgtgtcacctagagccccagatgccaagatgctggaggaactgcaagccgagacttggtaccaaggagagatgagcaggaaggaggcagaggggctgctggagaaagacggagacttcctggtcaggaagagcaccaccaacccgggctcctttgtcctcacgggcatgcacaatggccaggccaagcacctgctgctcgtggacccagaaggcacgatccagacaaaggacagagtctttgacagtatcagccacctcatcaaccaccacctagaaagcagcctgcccattgtctctgcagggagtgagctgtgtctccagcagccagtggagaggaagcagtgacatggccagcactgctcccggcactgcgcaccaggtcaggaggacctggagtggactagaatcggggctgctggaactgggacagctgcctgtggctcagagccttcttcaaaagcttcaaaaggaaggcttcctttaaggtcaagtttcataaacttggttctgaatttctcatatgcatattaaaggtgtacatacctatacatcctgtacaaattatccctctatatttatattttttaagactaagaaagacgtaagactaatgttctgtgctgtatgtttttaatgaaaaaaaaaaa

SEQ ID NO: 2106 - DNA, 509 bp, Homo sapiens
attctttccccaagtctctatggtagcgtcagcgtcggaggcggtagtgacggtggcgtttccttgaggaagagtgagggttccaacttttctgcttatctgggaggtgttgggcgcggacagtcgagatgtcagagaaaaagcagccggtagacttaggtctgttagaggaagacgacgagtttgaagagttccctgccgaagactgggctggcttagatgaagatgaagatgcacatgtctgggaggataattgggatgatgacaatgtagaggatgacttctctaatcagttacgagctgaactagagaaacatggttataagatggagacttcatagcatccagaagaagtgttgaagtaacctaaacttgacctgcttaatacattctagggcagagaacccaggatgggacactaaaaaaatgtgtttatttcattatctgcttggatttatttgtgtttttgtaacacaaaaaataaatgttttgatataaaaaaaaaaaaa

SEQ ID NO: 2107 - DNA, 1717 bp, Homo sapiens
gcgcggatcagcttccagcccagtcggcccggcccgggggccatggagctccgagcggcggatcgcgagcctcctgcgaaccccagcctgcacgcccggttagcattcggccgggagatgcggcagtggaatctggaagggcggtgaaaaacctacgtcctgccctcgcccggcctctccattcgtcccccgggtagagaggtgcccggctcccaccccttcccagccccagccctggagacagcagcccctagactactgagggacagcgacagcatgaaggctccgggtcggctcgtgctcatcatcctgtgctccgtggtcttctctgccgtctacatcctcctgtgctgctgggccggcctgcccctctgcctggccacctgcctggaccaccacttccccacaggctccaggcccactgtgccgggacccctgcacttcagtggatatagcagtgtgccagatgggaagccgctggtccgcgagccctgccgcagctgtgccgtggtgtccagctccggccaaatgctgggctcaggcctgggtgctgagatcgacagtgccgagtgcgtgttccgcatgaaccaggcgcccaccgtgggctttgaggcggatgtgggccagcgcagcaccctgcgtgtcgtctcacacacaagcgtgccgctgctgctgcgcaactattcacactacttccagaaggcccgagacacgctctacatggtgtggggccagggcaggcacatggaccgggtgctcggcggccgcacctaccgcacgctgctgcagctcaccaggatgtaccccggcctgcaggtgtacaccttcacggagcgcatgatggcctactgcgaccagatcttccaggacgagacgggcaagaaccggaggcagtcgggctccttcctcagcaccggctggttcaccatgatcctcgcgctggagctgtgtgaggagatcgtggtctatgggatggtcagcgacagctactgcagggagaagagccacccctcagtgccttaccactactttgagaagggccggctagatgagtgtcagatgtacctggcacacgagcaggcgccccgaagcgcccaccgcttcatcactgagaaggcggtcttctcccgctgggccaagaagaggcccatcgtgttcgcccatccgtcctggaggactgagtagcttccgtcgtcctgccagccgccatgccgttgcgaggcctccgggatgtcccatcccaagccatcacactccacaaaaacatttaatttatggatcctgcctcctgccacgtgctgggtggacctaaggttccttcccaccccattctggcgacacttggagccatctcaggcctcatgacttgaaggggagtggaggggggagccgtgtctcccccctccactccctgagtaattcatggcatttgggggctcaccccacctccaggtctgtcaagtggcctttgtccctggggctgatggcccccaactcaccagcatcatgaccttgtgccagtcctggtcctccctccccagccgcccctaccaccttttggtgccacacttctcaggctggccgccctggttggggcagccgagagcctggggttcattggtgaaggggccttggagttgtgactgccggggccgtatcaggaacgtacgggtaaacgtgtgttttctggaaaaaaaaaaaaaaaaaaaaaaaaaaa

SEQ ID NO: 2108 - DNA, 1630 bp, Homo sapiens
gcgcggatcagcttccagcccagtcggcccggcccgggggccatggagctccgagcggcggatcgcgagcctcctgcgaaccccagcctgcacgcccggttagcattcggccgggagatgcggcagtggaatctggaagggcggtgaaaaacctacgtcctgccctcgcccggcctctccattcgtcccccgggtagagagggtcggctcgtgctcatcatcctgtgctccgtggtcttctctgccgtctacatcctcctgtgctgctgggccggcctgcccctctgcctggccacctgcctggaccaccacttccccacaggctccaggcccactgtgccgggacccctgcacttcagtggatatagcagtgtgccagatgggaagccgctggtccgcgagccctgccgcagctgtgccgtggtgtccagctccggccaaatgctgggctcaggcctgggtgctgagatcgacagtgccgagtgcgtgttccgcatgaaccaggcgcccaccgtgggctttgaggcggatgtgggccagcgcagcaccctgcgtgtcgtctcacacacaagcgtgccgctgctgctgcgcaactattcacactacttccagaaggcccgagacacgctctacatggtgtggggccagggcaggcacatggaccgggtgctcggcggccgcacctaccgcacgctgctgcagctcaccaggatgtaccccggcctgcaggtgtacaccttcacggagcgcatgatggcctactgcgaccagatcttccaggacgagacgggcaagaaccggaggcagtcgggctccttcctcagcaccggctggttcaccatgatcctcgcgctggagctgtgtgaggagatcgtggtctatgggatggtcagcgacagctactgcagggagaagagccacccctcagtgccttaccactactttgagaagggccggctagatgagtgtcagatgtacctggcacacgagcaggcgccccgaagcgcccaccgcttcatcactgagaaggcggtcttctcccgctgggccaagaagaggcccatcgtgttcgcccatccgtcctggaggactgagtagcttccgtcgtcctgccagccgccatgccgttgcgaggcctccgggatgtcccatcccaagccatcacactccacaaaaacatttaatttatggatcctgcctcctgccacgtgctgggtggacctaaggttccttcccaccccattctggcgacacttggagccatctcaggcctcatgacttgaaggggagtggaggggggagccgtgtctcccccctccactccctgagtaattcatggcatttgggggctcaccccacctccaggtctgtcaagtggcctttgtccctggggctgatggcccccaactcaccagcatcatgaccttgtgccagtcctggtcctccctccccagccgcccctaccaccttttggtgccacacttctcaggctggccgccctggttggggcagccgagagcctggggttcattggtgaaggggccttggagttgtgactgccggggccgtatcaggaacgtacgggtaaacgtgtgttttctggaaaaaaaaaaaaaaaaaaaaaaaaaaa

SEQ ID NO: 2109 - DNA, 3493 bp, Homo sapiens
agatcttactccctttggcattttacaccttactcatacaatcatttttaaaaaatagcaatttaaaaaaatacagttcaagtgttcatcatatccaggcatgcaagccttttctaaatttttttaaataataaaaaagccccacagaggaaaggaggttatttgtgtcctcctgacacacacttttagattttggttaaaaagtctctagtgggtgcaaagtgaccccctttgtcactggaaacaaataggagcattctttgtgccactgtccacaaccacacagatatgtttcccaagggagctcatcaggtcttcaaacatttagcaagcatgacatgtgtaagagacagtattggagaagtaagacaagccttgctctgccgaagcttacaatccaggagctcaccccttcaaggaatttacagcctccagacagataataacattaggtccatgaaagcctacaaggcaagaagttcaggagagaaagaagtcataaccatcttggaagaatctcaacttgttttatcagaactcaaacgccaatttctcacccctagcttccctcattagcgcttattaactagtattgggaggaccaagcgaagagtaaagctagggtagcagaggccataagctaattgcaaaggacagagctaaagaaacatgctagtttcccctgagcacccaactgcatgactgaaaatggattaatttgtatttctaatggatatacaagaaacacgtgaatatgctaaaataaatttaaggtcaagcaatgcaaagtgttagtgcgtttgccttccactctcagaggcagcctctcttatttggttcttgggctgcttcataaaaagttctgtgttttttaatggcctcagcttttgggaggctcaggccacctagcccatcaggagaccaggcccgaaggatggatctgaagagtgggcaacggagagttaaaccagggctgacttcaacaggcccagtcaagtcaggggcaagcacattgtccatccactggaagacggaaaggggagaggaaggcaggccctcccgactcacaggtcacctcgcaactttgctaggcactacccaccctttagggataagtgaagtatgtggtgggcatacaaggcgcacaggggagtcattctggcaaattccaagaaggttttaagggctcccgaggcaggcaggcccagttgctgtttggagcttcctttggggtgggaggatggcgggggcagggggccggggcggtgccttaacgaggggagatgcttttaaatagctgccttccaaaaaccatcctccctgcttctttgagaagcacccagctgttgtttaccctccaggacagcaaatccggttatttgtctctctattccgtgatattataaagtaatgaatggtccattaaactaagtttgggatcccgtctccccacagccacctcctcgccggcaccctcagccggggaggccgtaggctcggctgcagcctggcagcctcagtccccctccctccaccatttccccctactccctccctctcctgcaccccctccccccggttatttgggagattagagttcattaattaaatcctgtgcttagatcgaactgtaacattattccaatcacatttatcttgcaggcggcggaggagatggcagcctcgctggaaacgcgcgggggagcctgagccggcggccggggacgcacggcgctgcgcgctccttcgccacgccgccgcgcagcccctccatcttcctgctcggcaccgggccccgcgcgcccctgcctacggggtcccgctgctctccggggctcctgccagccccaacccccggccccggtggcctccccccacccccgcccgggtccccctcctccgccacacgcgcgcgcgctcacacacacacacacacacacacacacatatatacacgccagcgagctgctggccgctcaatggaccgatttccccggtttccctgaacccagcccagcccgggatgagaaactgcaaaatggcccgggtcgccagtgtgctggggctggtcatgctcagcgtcgccctgctgattttatcgctcatcagctacgtgtccctgaaaaaggagaacatcttcaccactcccaagtacgccagcccgggggcgccccgaatgtacatgttccacgcgggattccggtcacaatttgcgctgaagtttctagacccgtcattcgtgcccattacgaattctctcacccaggaactccaagagaaaccttctaagtggaaatttaatcggacagcgtttttacatcaaaggcaagaaattcttcagcatgtcgatgtaataaaaaatttttctttgaccaagaatagtgttcggattggacaactgatgcactatgattattccagccataaatatgttttctctattagcaataacttccggtcacttcttccagatgtgtcacccattatgaacaagcattataatatttgtgctgtggttggaaatagtgggatcctgacatttatccagtgtggacgagaaatagataaatcagattttgttttccgttgcaatttcgccccatcggaggctttccaaagagatgttggaaggaaaaccaatcttaccaccttcaaccccagcatcctggaaaaatattacaacaatctcttgactattcaggaccgtaacaactttttcctcagtttaaaaaagcttgacggggccattctttggatccctgcatttttcttccacacttcagcaactgtgaccaggacattagttgacttttttgttgaacacagaggtcagttaaaagtccaactggcttggccgggaaatataatgcaacatgtcaacaggtactggaaaaacaaacatttgtcacctaaacggctgagcacaggtattcttatgtacacccttgcatcagcaatatgtgaagagatccacttgtatggattttggccgtttggatttgaccccaacacaagggaagatcttccataccattactatgacaaaaaaggaaccaaatttaccaccaagtggcaggagtcccaccagctgcctgctgagtttcagctgctgtaccgaatgcatggggaagggctcaccaagctgactctgtcacactgtgcctaagaactccaaacggaaagcgccaaatggctgtttaaaaagtgccccaaatcaaattgaatagccttcagaatagaaccctagagaatgtcttataaggattgtctgccatttaaaaggaaagatgtcttttctcttttgcactgctcttttaagagttttagcagatttagcaggacagatgcattgaagccacatggtttagacttgattgataaagggaatgttgcatttgggactatgctgctaacgaaatggtttgaagtattttcatgtttggattttaataataaactgcctctcatttttatgaagactagagctatattt

SEQ ID NO: 2110 - DNA, 4188 bp, Homo sapiens
gctttatttttcaattcttcctagtcccggttttgcatttctaatgacagtgaactgacaaagcgtgaaagtggtctaaggagcaaaacaaagccagcaagcctgcttctggtgtgccaagattaatcaatattccagaaacctcggggtttccccctcctccctgtgcggtttccattccccactcctcctttcccgggcacagactcctccccttttcttaagttgccctgatagtaacttgcagtttcagagcacatgcacactgtcagggctagcctgcctgcttacgcgcgctgcggattgttgctccgttgtacctgctggggaattcacctcgttactgcttgatatcttccaccccttacaaaatcagaaaagttgtgttttctaataccaaagaggaggtttggctttctgtgggtgattcccagacactgaagtgcaaagaagagaccctcctagaaaagtaaaatatgactaaaagcaatggagaagagcccaagatggggggcaggatggagagattccagcagggagtccgtaaacgcacacttttggccaagaagaaagtgcagaacattacaaaggaggatgttaaaagttacctgtttcggaatgcttttgtgctgctcacagtcaccgctgtcattgtgggtacaatccttggatttaccctccgaccatacagaatgagctaccgggaagtcaagtacttctcctttcctggggaacttctgatgaggatgttacagatgctggtcttaccacttatcatctccagtcttgtcacaggaatggcggcgctagatagtaaggcatcagggaagatgggaatgcgagctgtagtctattatatgactaccaccatcattgctgtggtgattggcataatcattgtcatcatcatccatcctgggaagggcacaaaggaaaacatgcacagagaaggcaaaattgtacgagtgacagctgcagatgccttcctggacttgatcaggaacatgttccctccaaatctggtagaagcctgctttaaacagtttaaaaccaactatgagaagagaagctttaaagtgcccatccaggccaacgaaacgcttgtgggtgctgtgataaacaatgtgtctgaggccatggagactcttacccgaatcacagaggagctggtcccagttccaggatctgtgaatggagtcaatgccctgggtctagttgtcttctccatgtgcttcggttttgtgattggaaacatgaaggaacaggggcaggccctgagagagttctttgattctcttaacgaagccatcatgagactggtagcagtaataatgtggtatgcccccgtgggtattctcttcctgattgctgggaagattgtggagatggaagacatgggtgtgattggggggcagcttgccatgtacaccgtgactgtcattgttggcttactcattcacgcagtcatcgtcttgccactcctctacttcttggtaacacggaaaaacccttgggtttttattggagggttgctgcaagcactcatcaccgctctggggacctcttcaagttctgccaccctacccatcaccttcaagtgcctggaagagaacaatggcgtggacaagcgcgtcaccagattcgtgctccccgtaggagccaccattaacatggatgggactgccctctatgaggctttggctgccattttcattgctcaagttaacaactttgaactgaacttcggacaaattattacaatcagcatcacagccacagctgccagtattggggcagctggaattcctcaggcgggcctggtcactatggtcattgtgctgacatctgtcggcctgcccactgacgacatcacgctcatcatcgcggtggactggttcctggatcgcctccggaccaccaccaacgtactgggagactccctgggagctgggattgtggagcacttgtcacgacatgaactgaagaacagagatgttgaaatgggtaactcagtgattgaagagaatgaaatgaagaaaccatatcaactgattgcacaggacaatgaaactgagaaacccatcgacagtgaaaccaagatgtagactaacataaagaaacactttcttgagcaccaggtgttaaaaaccattataaaatctttccatctcattacagctcattcgctccagcaagcccgtcatcttccctttcctcccttctgataagactggaaaatagtcctccaaaacacaagggaggattttgggtggccaaagtgtacaattttcatcccacaattgaaatttttaaatcatttcatgttagtcttaccgaataaggtaccaagatcacaaatagtgttgatcagatcttacaagtttatgtggcacacaatcctataaatgtgatttttttatataagttaaagagacaaatagtaggctaaaaacattttaaaatcaacttttgaaatttaaaaatctttcagaatacaattcagttttagtttcaaaatgttaacaacttgaattacaaccggttatcagttggacagtaagattttatccctttctcttctgactggtatacctatttcattagtagctaggtgcacatatacatctagcacagctgtgaggacagacagaaggcaaagtttccatgtggccttgagcaagtcccatctcacctctaggcctcagtgtcctcatctataaaatgagggacttccctagaagtcttcatggtctcttccagcccagacatcctgtgatgtcatgaaagcacctgccctctgtttcccctcagaacaccctgtaccatccatggagcacgaggccttcagaaaagacacttcaatgggagtgaacatttctaactaaggacaggatggctgtgtgtggtggtcaccaggtcctgtgagcaaagtgcaggttatgcaagtcgccaggcaggaggccattccaggagtgggattattcatcaaactctttgcccagttcatcccaatgggggaagtattcccttctttcctactctgggaagaatgtctcctgccactcctcaactgatgatagacttcgaaaacagatgagaagactagcagctagcaagggtgcttgtggtcacactgtggaacactaaagagctaggaaagagttgagcacaggcaacattacaaacaaaggatttgaaaacaccaagagtacaggtcttctttaaggaagaataaaaaagaagaggttcatttttctggctttttttttcacctgaaacactttttctcgagtccaaaatcattccccccgtgaagtctgcttaccaaaacataagacgacttatatatttgaaagaagtcaaatgaatgagctctctaatagaagtccatgagttgagtgggtatttcttatttgaaagtgtttttctttaatcaaaagtccttagaatgagggaaacaaaatatttatttgttttggaatcccacttatcaaatcattcaaaactttcagctggagtggggtttgcttttgttttgtttgtgtccataagagaaatggtagaagatgaatcagtatgaagacactgtcaatgaggttatgagaaaaaaacagcaggggcattagtttcaggcaaggcagctcccaggtttagagattaatttttaccccctaaggaatatccagtcaaagacgctgagtgggagctgtcaggcagtagcagctgtgtttgagtttctggctgaaaatggtgaagaatggacttaattatgctaacaaactgaaaaatctagacatagatcctctgatatacaattagagatatttttatatagaccccaagcattctgtgcataaaagttaacattaggctgtggtgcagtaaccatttaatgtcgaggctctatttcggaaatacactacaaatgttaaagtacgtggctgtcctcttaagacactagtagagcaaagacttaatcatatcaacttaattctgttacacaatatgtgttttttaatatactaaccatttcttatggaaaggtcctgtggggagcccatcctctcgccaagccatcacaggctctgcatacacatgcactcagtgtggactgggaagcattactttgtagatgtattttcaataaagaaaaaaatagttttacattaaaaaaaaaaaaaaaaaaaa

SEQ ID NO: 2111 - DNA, 1695 bp, Homo sapiens
gttgccgctgcgcacctggctcaggtgagctgccccgcccccgcccggcgcgagccccaggtcctggcagcagcccctgacctgtccaggtgccctgtccagctgactgcaaggacagagaggagtcctgcccagctcttggatcagtctgctggccgaggagcccggtggagccaggggtgaccctggagcccagcctgccccgaggaggccccggctcagagccatgccaggtgtctgtgatagggcccctgacttcctctccccgtctgaagaccaggtgctgaggcctgccttgggcagctcagtggctctgaactgcacggcttgggtagtctctgggccccactgctccctgccttcagtccagtggctgaaagacgggcttccattgggaattgggggccactacagcctccacgagtactcctgggtcaaggccaacctgtcagaggtgcttgtgtccagtgtcctgggggtcaacgtgaccagcactgaagtctatggggccttcacctgctccatccagaacatcagcttctcctccttcactcttcagagagctggccctacaagccacgtggctgcggtgctggcctccctcctggtcctgctggccctgctgctggccgccctgctctatgtcaagtgccgtctcaacgtgctgctctggtaccaggacgcgtatggggaggtggagataaacgacgggaagctctacgacgcctacgtctcctacagcgactgccccgaggaccgcaagttcgtgaacttcatcctaaagccgcagctggagcggcgtcggggctacaagctcttcctggacgaccgcgacctcctgccgcgcgctgagccctccgccgacctcttggtgaacctgagccgctgccgacgcctcatcgtggtgctttcggacgccttcctgagccgggcctggtgcagccacagcttccgggagggcctgtgccggctgctggagctcacccgcagacccatcttcatcaccttcgagggccagaggcgcgaccccgcgcacccggcgctccgcctgctgcgccagcaccgccacctggtgaccttgctgctctggaggcccggctccgtgactccttcctccgatttttggaaagaagtgcagctggcgctgccgcggaaggtgcggtacaggccggtggaaggagacccccagacgcagctgcaggacgacaaggaccccatgctgattcttcgaggccgagtccctgagggccgggccctggactcagaggtggacccggaccctgagggcgacctgggtgtccgggggcctgtttttggagagccatcagctccaccgcacaccagtggggtctcgctgggagagagccggagcagcgaagtggacgtctcggatctcggctcgcgaaactacagtgcccgcacagacttctactgcctggtgtccaaggatgatatgtagctcccaccccagagtgcaggatcatagggacagcgggggccagggcagcggcgtcgctcctctgctcaacaggaccacaacccctgccagcagccctgggaccctgccagcagccctgggaaaaggctgtggcctcagggcgcctcccagtgccagaaaataaagtccttttggattctgaaaaaaaaaaaaaaaaaaaaaaaaaaaaaaaaaaaaaaaaaaaaaaaaaaaaaaaa

SEQ ID NO: 2112 - DNA, 1709 bp, Homo sapiens
agttcctgagagaagaaccctgaggaacagacgttccctcgcggccctggcacctctaaccccagacatgctgctgctgctgctgcccctgctctgggggagggagagggcggaaggacagacaagtaaactgctgacgatgcagagttccgtgacggtgcaggaaggcctgtgtgtccatgtgccctgctccttctcctacccctcgcatggctggatttaccctggcccagtagttcatggctactggttccgggaaggggccaatacagaccaggatgctccagtggccacaaacaacccagctcgggcagtgtgggaggagactcgggaccgattccacctccttggggacccacataccaagaattgcaccctgagcatcagagatgccagaagaagtgatgcggggagatacttctttcgtatggagaaaggaagtataaaatggaattataaacatcaccggctctctgtgaatgtgacagccttgacccacaggcccaacatcctcatcccaggcaccctggagtccggctgcccccagaatctgacctgctctgtgccctgggcctgtgagcaggggacaccccctatgatctcctggatagggacctccgtgtcccccctggacccctccaccacccgctcctcggtgctcaccctcatcccacagccccaggaccatggcaccagcctcacctgtcaggtgaccttccctggggccagcgtgaccacgaacaagaccgtccatctcaacgtgtcctacccgcctcagaacttgaccatgactgtcttccaaggagacggcacagtatccacagtcttgggaaatggctcatctctgtcactcccagagggccagtctctgcgcctggtctgtgcagttgatgcagttgacagcaatccccctgccaggctgagcctgagctggagaggcctgaccctgtgcccctcacagccctcaaacccgggggtgctggagctgccttgggtgcacctgagggatgcagctgaattcacctgcagagctcagaaccctctcggctctcagcaggtctacctgaacgtctccctgcagagcaaagccacatcaggagtgactcagggggtggtcgggggagctggagccacagccctggtcttcctgtccttctgcgtcatcttcgttgtagtgaggtcctgcaggaagaaatcggcaaggccagcagcgggcgtgggagatacgggcatagaggatgcaaacgctgtcaggggttcagcctctcaggggcccctgactgaaccttgggcagaagacagtcccccagaccagcctcccccagcttctgcccgctcctcagtgggggaaggagagctccagtatgcatccctcagcttccagatggtgaagccttgggactcgcggggacaggaggccactgacaccgagtactcggagatcaagatccacagatgagaaactgcagagactcaccctgattgagggatcacagcccctccaggcaagggagaagtcagaggctgattcttgtagaattaacagccctcaacgtgatgagctatgataacactatgaattatgtgcagagtgaaaagcacacaggctttagagtcaaagtatctcaaacctgaatccacactgtgccctcccttttatttttttaactaaaagacagacaaattcctaaaaaaaaaaaaaaaaaaaa

SEQ ID NO: 2113 - DNA, 5136 bp, Homo sapiens
ccagtctgggcaccggagcctgtgaccgcttcgttagtggagaggtagctggcagtccgcttcggcgggcctgtgccccgcgccgttctcggggcctccctgctgagctcgcggctcacgctgagagggacacgcagtgacgagcggccgaagcagctttgcggtgagagcacgctgggccgggggccgggcgggagcctggtggcgggtaacgccggactcgagggttttgtagtgcatccctgagcatgagcacagaatgaagcggcgtttggatgaccaggagtcaccggtgtatgcagcccagcagcgtcggatccctggcagcacagaggcttttcctcaccagcaccgggtgcttgcccctgcccctcctgtgtatgaagcagtgtctgagaccatgcagtcagctacgggaattcagtactctgtaacacccagctaccaggtttcagccatgccacagagctccggcagtcatgggcccgctatagcagcagttcatagcagccatcatcacccaacagcggtgcagccccacggaggccaggtggtccagagtcatgctcatccagccccaccagttgcaccagtgcagggacagcagcaatttcagaggctgaaggtggaggatgcgctatcttatcttgaccaggtgaagctgcagtttggtagtcagcctcaggtctacaatgatttccttgacatcatgaaggaatttaaatctcagagcatcgacaccccaggagtgattagtcgtgtgtcccagctattcaaaggccaccccgatctgataatgggattcaacaccttcttgccccctggctacaaaattgaggtgcaaaccaatgacatggtgaatgtgacaactcctggccaggttcatcagattcccacccatggcatccagccacagcctcaaccaccaccccaacatccttcccagccttcagcccagtcagccccagctcctgcccagccagctcctcagcccccacctgccaaagtcagcaagccctcccaactgcaagcacatactccggccagtcagcagactcccccacttccaccgtatgcatccccacgttctccgccggtccagcctcacacaccagtgacaatctcgttgggaacggccccatccttgcagaacaatcaacctgtggagtttaatcatgccatcaactatgttaataagatcaagaacagatttcagggccaaccagacatctacaaagcattcctggagattttgcacacatatcagaaagagcagagaaatgccaaggaagctggaggaaactacactccagcattgacagagcaggaggtgtatgcccaggttgctcgtctctttaaaaaccaggaagatttgttgtcagagtttggacaattcctaccagatgccaacagctccgtgcttttaagcaaaacaactgctgagaaggttgattctgtgagaaatgatcatggaggcactgtcaagaagccccaactgaacaacaagccgcagaggcccagccagaatggctgccagatccgcagacatcctacaggaaccacccctccagttaagaagaaacccaaactgctcaatctgaaggattcttctatggcagatgccagcaaacatggtggtggaacagaatcgttattttttgataaggtccgaaaggctcttcggagtgcagaagcctacgaaaatttcctacgctgtcttgttatttttaaccaggaggtgatctctcgtgctgagcttgtgcaactagtctctcctttcctggggaaattccctgagttgtttaattggtttaaaaactttctgggctataaggagtctgtacatctggaaacttatccaaaggagcgagccacagagggcattgctatggagatagattatgcttcttgtaaacgattgggctccagctatcgagccttaccaaagagttaccagcagcccaagtgtacaggacggactcctctctgtaaagaggttttaaatgatacctgggtttccttcccttcgtggtctgaggactctacctttgtgagttccaagaagactcaatatgaagaacatatttatcgttgtgaagatgaacgctttgagcttgatgtagttttagagaccaatctggcaacaatccgggttctggaagcaatacagaagaagctttcccgcttgtctgctgaagaacaagccaaatttcgcttggacaacacccttgggggcacatcagaagtcatccatagaaaagcactccagaggatatatgctgataaagcagctgacatcattgatggtctgagaaagaatccctccattgctgttccaattgtccttaaaaggttgaagatgaaagaggaagaatggcgagaagctcagagaggctttaacaaagtatggcgagaacaaaatgagaaatactacttgaagtctctggaccaccaggggatcaactttaaacagaatgacaccaaggtcctgaggtctaagagcttactcaatgagattgagagtatctatgatgagaggcaagagcaggctacggaggagaatgctggtgtacctgttggcccacacctctcacttgcgtatgaagacaaacaaatactggaagatgctgctgctctgattatccaccatgtgaagaggcagacaggcattcagaaggaggacaaatataagataaaacaaatcatgcatcattttattccagatttgctctttgcccaaagaggtgatctctcagatgtggaggaagaggaagaagaagagatggatgtagatgaagccacaggggcagttaagaagcacaatggtgttgggggcagtccccctaagtccaagttactgtttagtaacacagcagctcaaaaattaagaggaatggatgaagtatacaacctcttctatgtcaacaacaactggtatatttttatgcgactgcaccagattctctgcctgaggctgctacggatttgttcccaagccgaacggcaaattgaagaagaaaaccgagagagagaatgggaacgggaagtgctgggcataaagcgagacaagagtgacagccctgccattcagctacgtctcaaagaacctatggatgttgatgtagaagattattacccagctttcctggacatggtgcggagcctgctggatggcaacatagactcatcacagtatgaagattcactgagagagatgttcaccattcatgcctacattgcctttaccatggacaaactgatccagagcattgtcagacagctgcagcatatcgtgagtgatgagatctgtgtgcaggtgactgacctttacctggcagaaaataataatggggccaccggaggccagctgaacacacagaactcaaggagcctcctggagtcaacgtatcagcggaaagctgagcagctaatgtcagatgagaattgctttaagcttatgtttattcagagccaaggccaggtccagctgactattgagcttctggacacagaagaggagaattcggatgaccctgtggaagcagagcgctggtcagactacgtggagcgatacatgaattcagatactacctcgcctgagcttcgtgaacatctagcacagaaaccagtatttctccccaggaatctacggcggatccggaagtgtcaacgtggtcgagagcagcaggaaaaggaagggaaggaaggaaacagcaagaagaccatggagaatgtggatagtctggataagctggagtgtagattcaagctgaattcctacaagatggtgtatgtgatcaaatcagaggactatatgtatcggaggaccgccctgctccgggctcatcagtcccatgagcgtgtaagcaagcgtctacatcagagattccaggcctgggtagataaatggaccaaggagcatgtgccccgtgaaatggcagcagagaccagcaagtggctcatgggtgaggggctggagggcctggtgccctgtaccaccacctgtgatacagagaccctgcattttgtgagcattaacaagtatcgtgtcaaatacggcacagtattcaaagccccttaactgcaaagccagagcagataacttggggtgtgtgtggggatgtgtgtgtgggcctatgcactcacacactgaagaaacaaggaagatgcctttcaagcctcactgggcctctctgggacatggccacctgacctgtgtgtggctggtgcagcctggcaccaagtgggctacctgttaggaacatgaataccttacaaagctgaagctggaacttttcccaaagggttttgggtatagcctgccctggaggggaaggaagtccatgcaagcaaagacatgcagtttgcttgcacacaccagcagagctaagactggagtctcctgtggcctaactttcaatgagggaaccggatgctgttcacactttgactggatggagatgcatttacaaaacagactggagaaggacttaatactcagatggattggaactatcatggtcactgctcctctcccctccccacaaaaggaaaaaaaagctggatttgattttttttttctggtcactcgagcacatctaagatcacccattaggttttatctgggacctgcagtttggctttgggattgatcatcttgtggattttattcctgacgattcccttgctgcctacccttttctctcctctggttctcaacctcaacgagttcaaatcagttgtcctttttagctcccgtggaactgttttgtatctgcctctttactagtctaccttagtgccatccaccagctttactctctgacacacacacgcacacacacacacaattttaacttgtttttttgtacataatgtacatactgtcaattttttattaaaagaaatatgctttgatgtgctagcataactgctctagcttcttgtgtaccatagtactgtggcttcagatttagtacctatgaacagatgtacaagacatttattacactttttaccaaagggagttaccattgtagtacttttgtgtaaaacttgtcttcccctttgcccccaacttttttttttttttttggtaaaaaaaaaaaaagcttgggttcttacttaaaaaaaaaa

SEQ ID NO: 2114 - DNA, 4107 bp, Homo sapiens
gtcgagcgggagcagaggaggcgagggaggagggccagagaggcagttggaagatggcggacgaggcggccctcgcccttcagcccggcggctccccctcggcggcgggggccgacagggaggccgcgtcgtcccccgccggggagccgctccgcaagaggccgcggagagatggtcccggcctcgagcggagcccgggcgagcccggtggggcggccccagagcgtgaggtgccggcggcggccaggggctgcccgggtgcggcggcggcggcgctgtggcgggaggcggaggcagaggcggcggcggcaggcggggagcaagaggcccaggcgactgcggcggctggggaaggagacaatgggccgggcctgcagggcccatctcgggagccaccgctggccgacaacttgtacgacgaagacgacgacgacgagggcgaggaggaggaagaggcggcggcggcggcgattgggtaccgagataaccttctgttcggtgatgaaattatcactaatggttttcattcctgtgaaagtgatgaggaggatagagcctcacatgcaagctctagtgactggactccaaggccacggataggtccatatacttttgttcagcaacatcttatgattggcacagatcctcgaacaattcttaaagatttattgccggaaacaatacctccacctgagttggatgatatgacactgtggcagattgttattaatatcctttcagaaccaccaaaaaggaaaaaaagaaaagatattaatacaattgaagatgctgtgaaattactgcaagagtgcaaaaaaattatagttctaactggagctggggtgtctgtttcatgtggaatacctgacttcaggtcaagggatggtatttatgctcgccttgctgtagacttcccagatcttccagatcctcaagcgatgtttgatattgaatatttcagaaaagatccaagaccattcttcaagtttgcaaaggaaatatatcctggacaattccagccatctctctgtcacaaattcatagccttgtcagataaggaaggaaaactacttcgcaactatacccagaacatagacacgctggaacaggttgcgggaatccaaaggataattcagtgtcatggttcctttgcaacagcatcttgcctgatttgtaaatacaaagttgactgtgaagctgtacgaggagatatttttaatcaggtagttcctcgatgtcctaggtgcccagctgatgaaccgcttgctatcatgaaaccagagattgtgttttttggtgaaaatttaccagaacagtttcatagagccatgaagtatgacaaagatgaagttgacctcctcattgttattgggtcttccctcaaagtaagaccagtagcactaattccaagttccataccccatgaagtgcctcagatattaattaatagagaacctttgcctcatctgcattttgatgtagagcttcttggagactgtgatgtcataattaatgaattgtgtcataggttaggtggtgaatatgccaaactttgctgtaaccctgtaaagctttcagaaattactgaaaaacctccacgaacacaaaaagaattggcttatttgtcagagttgccacccacacctcttcatgtttcagaagactcaagttcaccagaaagaacttcaccaccagattcttcagtgattgtcacacttttagaccaagcagctaagagtaatgatgatttagatgtgtctgaatcaaaaggttgtatggaagaaaaaccacaggaagtacaaacttctaggaatgttgaaagtattgctgaacagatggaaaatccggatttgaagaatgttggttctagtactggggagaaaaatgaaagaacttcagtggctggaacagtgagaaaatgctggcctaatagagtggcaaaggagcagattagtaggcggcttgatggtaatcagtatctgtttttgccaccaaatcgttacattttccatggcgctgaggtatattcagactctgaagatgacgtcttatcctctagttcttgtggcagtaacagtgatagtgggacatgccagagtccaagtttagaagaacccatggaggatgaaagtgaaattgaagaattctacaatggcttagaagatgagcctgatgttccagagagagctggaggagctggatttgggactgatggagatgatcaagaggcaattaatgaagctatatctgtgaaacaggaagtaacagacatgaactatccatcaaacaaatcatagtgtaataattgtgcaggtacaggaattgttccaccagcattaggaactttagcatgtcaaaatgaatgtttacttgtgaactcgatagagcaaggaaaccagaaaggtgtaatatttataggttggtaaaatagattgtttttcatggataatttttaacttcattatttctgtacttgtacaaactcaacactaacttttttttttttaaaaaaaaaaaggtactaagtatcttcaatcagctgttggtcaagactaactttcttttaaaggttcatttgtatgataaattcatatgtgtatatataattttttttgttttgtctagtgagtttcaacatttttaaagttttcaaaaagccatcggaatgttaaattaatgtaaagggacagctaatctagaccaaagaatggtattttcacttttctttgtaacattgaatggtttgaagtactcaaaatctgttacgctaaacttttgattctttaacacaattatttttaaacactggcattttccaaaactgtggcagctaactttttaaaatctcaaatgacatgcagtgtgagtagaaggaagtcaacaatatgtggggagagcactcggttgtctttacttttaaaagtaatacttggtgctaagaatttcaggattattgtatttacgttcaaatgaagatggcttttgtacttcctgtggacatgtagtaatgtctatattggctcataaaactaacctgaaaaacaaataaatgctttggaaatgtttcagttgctttagaaacattagtgcctgcctggatccccttagttttgaaatatttgccattgttgtttaaatacctatcactgtggtagagcttgcattgatcttttccacaagtattaaactgccaaaatgtgaatatgcaaagcctttctgaatctataataatggtacttctactggggagagtgtaatattttggactgctgttttccattaatgaggagagcaacaggcccctgattatacagttccaaagtaataagatgttaattgtaattcagccagaaagtacatgtctcccattgggaggatttggtgttaaataccaaactgctagccctagtattatggagatgaacatgatgatgtaacttgtaatagcagaatagttaatgaatgaaactagttcttataatttatctttatttaaaagcttagcctgccttaaaactagagatcaactttctcagctgcaaaagcttctagtctttcaagaagttcatactttatgaaattgcacagtaagcatttatttttcagaccatttttgaacatcactcctaaattaataaagtattcctctgttgctttagtatttattacaataaaaagggtttgaaatatagctgttctttatgcataaaacacccagctaggaccattactgccagagaaaaaaatcgtattgaatggccatttccctacttataagatgtctcaatctgaatttatttggctacactaaagaatgcagtatatttagttttccatttgcatgatgtttgtgtgctatagatgatattttaaattgaaaagtttgttttaaattatttttacagtgaagactgttttcagctctttttatattgtacatagtcttttatgtaatttactggcatatgttttgtagactgtttaatgactggatatcttccttcaacttttgaaatacaaaaccagtgttttttacttgtacactgttttaaagtctattaaaattgtcatttgacttttttctgttaaaaaaaaaaaaaaaaaaaa

SEQ ID NO: 2115 - DNA, 2385 bp, Homo sapiens
gcgactcgtcccgccttctggggcactagtttgactttgtgattggctactagtatcaaggaatcccggcgtggacagcgcgaggagaaagatggcggcgatggcggtcgggggtgctggtgggagccgcgtgtccagcgggagggacctgaattgcgtccccgaaatagctgacacactaggggctgtggccaagcaggggtttgatttcctctgcatgcctgtcttccatccgcgtttcaagagggagttcattcaggaacctgctaagaatcggcccggtccccagacacgatcagacctactgctgtcaggaagggactggaatacgctaattgtgggaaagctttctccatggattcgtccagactcaaaagtggagaagattcgcaggaactccgaggcggccatgttacaggagctgaattttggtgcatatttgggtcttccagctttcctgctgccccttaatcaggaagataacaccaacctggccagagttttgaccaaccacatccacactggccatcactcttccatgttctggatgcgggtacccttggtggcaccagaggacctgagagatgatataattgagaatgcaccaactacacacacagaggagtacagtggggaggagaaaacgtggatgtggtggcacaacttccggactttgtgtgactatagtaagaggattgcagtggctcttgaaattggggctgacctcccatctaatcatgtcattgatcgctggcttggggagcccatcaaagcagccattctccccactagcattttcctgaccaataagaagggatttcctgttctttctaagatgcaccagaggctcatcttccggctcctcaagttggaggtgcagttcatcatcacaggcaccaaccaccactcagagaaggagttctgctcctacctccaatacctggaatacttaagccagaaccgtcctccacctaatgcctatgaactctttgccaagggctatgaagactatctgcagtccccgcttcagccactgatggacaatctggaatctcagacatatgaagtgtttgaaaaggaccccatcaaatactctcagtaccagcaggccatctataaatgtctgctagaccgagtaccagaagaggagaaggataccaatgtccaggtactgatggtgctgggagcaggacggggacccctggtgaacgcttccctgcgggcagccaagcaggccgaccggcggataaagctgtatgctgtggagaaaaacccaaatgccgtggtgacgctagagaactggcagtttgaagaatggggaagccaagtgaccgtagtctcatcagacatgagggaatgggtggctccagagaaagcagacatcattgtcagtgagcttctgggctcatttgctgacaatgaattgtcgcctgagtgcctggatggagcccagcacttcctaaaagatgatggtgtgagcatccccggggagtacacttcctttctggctcccatctcttcctccaagctgtacaatgaggtccgagcctgtagggagaaggaccgtgaccctgaggcccagtttgagatgccttatgtggtacggctgcacaacttccaccagctctctgcaccccagccctgtttcaccttcagccatcccaacagagatcctatgattgacaacaaccgctattgcaccttggaatttcctgtggaggtgaacacagtactacatggctttgccggctactttgagactgtgctttatcaggacatcactctgagtatccgtccagagactcactctcctgggatgttctcatggtttcccatcctcttccctattaagcagcccataacggtacgtgaaggccaaaccatctgtgtgcgtttctggcgatgcagcaattccaagaaggtgtggtatgagtgggctgtgacagcaccagtctgttctgctattcataaccccacaggccgctcatataccattggcctctagccctgcgtgccaagtgtccagagccttggaagcagcttcaggttctgctcctgtagtacagaaggtgcagtacatctatgggctgtgattccccttgcccatcagagaggagcatttcaatctgctttcctgccttacatcaaggtgggcaagggattataattaattgcagggctcaagccaccaatctatgaagacctcaggccagggggtgaggaattagtgctggatttgaagctacgcactcagcctcaagaactccctggaatatccctgagaacatggggtttgaacggattttcagcctttttctgttcttgttttgatggttttgtgtaagaggaaatacaaataaagttatagccctttactgcacgacc

SEQ ID NO: 2116 - DNA, 2146 bp, Homo sapiens
cgctcgcgctggaagaagcggaagaagatggcgctcaccagctttttacctgcacctactcagctatctcaggaccagcttgaggctgaagaaaaggcaagatcccagagatcacggcagacctcactggtctcctcccgaagagaacctcccccgtacggataccggaaaggctggatacctcggttattagaggattttggagatggaggtgcttttccagagatccatgtggcccagtatccactggatatgggacgaaagaaaaaaatgtcgaatgcgctggccattcaggtggattctgaaggaaaaattaaatatgatgcaattgctcgacaaggacagtcaaaagacaaggtcatttatagcaaatacactgacctggttccaaaggaggttatgaatgcagatgatccagacctgcaaaggcccgatgaagaagctattaaagagataacagaaaagacaagagtagccttagaaaaatctgtatcacagaaggtcgccgcagccatgccagttcgagcagctgacaaattggctcctgctcagtatatccgatacacaccatctcagcaaggagtggcattcaactctggagctaaacagagggttattcggatggtagaaatgcagaaagatccaatggagcctccaaggttcaagattaataagaaaattccccggggaccaccttctcctcctgcgcctgtcatgcattctcctagccgaaagatgactgtaaaggaacaacaagagtggaagattcctccttgtatttctaactggaaaaatgcaaagggttatacaattccattagacaaacgtctggctgctgatggaagaggactacagacagtacacataaatgaaaatttcgccaaattggcagaagccctctacattgctgatcggaaggctcgtgaagctgtggaaatgcgtgcccaagtagagagaaaaatggctcagaaagaaaaggaaaaacatgaagagaaacttagagaaatggcccagaaagccagggagagaagagctgggatcaaaactcatgtggaaaaagaggatggggaggcacgtgagagggatgaaatccggcatgacaggcgaaaagagagacagcatgaccggaatctttccagggcagctcctgataagaggtcgaaacttcagagaaatgaaaatcgggatatcagtgaagttattgctctcggtgttcctaatcctcggacttccaatgaagttcagtatgaccaaaggctcttcaaccaatccaagggtatggacagtggatttgcaggtggagaagatgaaatttataatgtttatgatcaagcctggagaggtggtaaagatatggcccagagtatttataggcccagtaaaaatctggacaaggacatgtatggtgatgacctagaagccagaataaagaccaacagatttgttcccgacaaggagttttctggttcagaccgtagacagagaggccgagaaggaccagtgcagtttgaggaagatccttttggtttggacaagtttttggaagaagccaaacagcatggtggctctaaaagaccctcagatagcagccgccccaaggaacacgagcatgaaggcaagaagaggaggaaggaataggcacaggtctctccaaagtgaatgaactcttacccataaccctaatgatgcaagtcatatgggggaacactttgtaaatggtcaggataaaaaccaaatctgggtgccagatcccagcactactttttattactggagaaatgggggggatagaaaattctactttgaattatttagttttttttaaagagtgggttgtgtttgtgcttctcccacctttcagcatttatagaacatgctgccccacatacaaagtcaagaccacttacttttatgtgacactagtagtttggggttaatgttttgtgtaagaacagctgcatatgagtaaagttaccccaaccacagtgaggaggaagatgttcacatactggaactgtcctgccaaataaattttgcccctattgtgctctgttttaatttggagtgggcaaagtaacctcttgcttggtgcaactatttgtttcaaataaaaacatttagacaaaaaaaaaaaaaaaaaaaaaaa

SEQ ID NO: 2117 - DNA, 1600 bp, Homo sapiens
gaattccgggctgtagagccttgcgcgcgcagtggggatggaacgttgctaggcttagcgggtctggctgctgggggcccgagcagcacgctcggagccgccgcgcgccaaagcgggaatctgggaggcgagcagctctgcagttaatgcacgtattttaaactcccgggcctgcggacgctatgcacaggaagcacctccaggagattccagacctgagtagcaacgttgccaccagcttcacgtggggatgggattccagcaagacttctgaactgctgtcaggcatgggggtctccgccctggagaaagaggagcccgacagtgagaacatcccccaggaactgctctcaaacctgggccacccggagagccccccacggaaacggctgaagagcaaagggagtgacaaagactttgtgattgtccgcaggcctaagctaaatcgagagaactttccaggtgtttcatgggactcccttccggatgagctgctcttgggaatcttttcctgtctgtgcctccctgagctgctaaaggtctctggtgtttgtaagaggtggtatcgcctagcgtctgatgagtctctatggcagaccttagacctcacaggtaaaaatctgcacccggatgtgactggtcggttgctgtctcaaggggtgattgccttccgctgcccacgatcatttatggaccaaccattggctgaacatttcagcccttttcgtgtacagcacatggacctatcgaactcagttatagaagtgtccaccctccacggcatactgtctcagtgttccaagttgcagaatctaagcctggaaggcctgcggctttcggatcccattgtcaatactctcgcaaaaaactcaaatttagtgcgacttaacctttctgggtgttctggattctctgaatttgccctgcagactttgctaagcagctgttccagactggatgagctgaacctctcctggtgttttgatttcactgaaaagcatgtacaggtggctgttgcgcatgtgtcagagaccatcacccagctgaatcttagcggctacagaaagaatctccagaaatcagatctctctactttagttagaagatgccccaatcttgtccatctagacttaagtgatagtgtcatgctaaagaatgactgctttcaggaatttttccagctcaactacctccaacacctatcactcagtcggtgctatgatataatacctgaaactttacttgaacttggagaaattcccacactaaaaacactacaagtttttggaatcgtgccagatggtacccttcaactgttaaaggaagcccttcctcatctacagattaattgctcccatttcaccaccattgccaggccaactattggcaacaaaaagaaccaggagatatggggcatcaaatgccgactgacactgcaaaagcccagttgtctatgaagtatttattgcaggatggtgtctcttctttagaacagggaaaataggcaggaagcccaattgctggagtacttagctagttttattcttggttttccctttgccttcattctgcaagtatactagggagccatttgagaggg

SEQ ID NO: 2118 - DNA, 1462 bp, Homo sapiens
cgggctgtagagccttgcgcgcgcagtggggatggaacgttgctaggcttagcgggtctggctgctgggggcccgagcagcacgctcggagccgccgcgcgccaaagcgggaatctgggaggcgagcagctctgcagttaatgcacgtattttaaactcccgggcctgcggacgctatgcacaggaagcacctccaggagattccagacctgagtagcaacgttgccaccagcttcacgtggggatgggattccagcaagacttctgaactgctgtcaggcatgggggtctccgccctggagaaagaggagcccgacagtgagaacatcccccaggaactgctctcaaacctgggccacccggagagccccccacggaaacggctgaagagcaaagggagtgacaaagactttgtgattgtccgcaggcctaagctaaatcgagagaactttccaggtgtttcatgggactcccttccggatgagctgctcttgggaatcttttcctgtctgtgcctccctgagctgctaaaggtctctggtgtttgtaagaggtggtatcgcctagcgtctgatgagtctctatggcagaccttagacctcacaggtaaaaatctgcacccggatgtgactggtcggttgctgtctcaaggggtgattgccttccgctgcccacgatcatttatggaccaaccattggctgaacatttcagcccttttcgtgtacagcacatggacctatcgaactcagttatagaagtgtccaccctccacggcatactgtctcagtgttccaagttgcagaatctaagcctggaaggcctgcggctttcggatcccattgtcaatactctcgcaaaaaactcaaatttagtgcgacttaacctttctgggtgttctggattctctgaatttgccctgcagactttgctaagcagctgttccagactggatgagctgaacctctcctggtgttttgatttcactgaaaagcatgtacaggtggctgttgcgcatgtgtcagagaccatcacccagctgaatcttagcggctacagaaagaatctccagaaatcagatctctctactttagttagaagatgccccaatcttgtccatctagacttaagtgatagtgtcatgctaaagaatgactgctttcaggaatttttccagctcaactacctccaacacctatcactcagtcggtgctatgatataatacctgaaactttactattagtgacaagagctggggttaggatccggttggactctgacatcggatgccctcaaacatacagaacttccaaactcaagtccagccataagctattttgccaacatgtcagagtaatctgtatttttgtatgtgatttctacttttatagacttgttttaaaacaataaaacacatttttataaaaatgagtgcttaaactaaaaaaaaaaaaaaaaaaaaa

SEQ ID NO: 2119 - DNA, 3378 bp, Homo sapiens
cgcgagagcttcgcggcgggagagcggctggtgtcgccggcttacgtgcggcagggctgtgaggcccgccgctcgcatgagcacctcatacggctgcttctggagaagggcaagtgtccagagaatggctgggatgaaagtacacttgaactctttttacatgaacttgcaatcatggacagcaacaatttcttaggcaattgtggtgtgggagaaagggaagggagagtggcatccgcactggttgctcgtcgtcattacaggttcattcatggcattggacgatccggtgatatttctgctgtgcaaccaaaagctgcaggctctagccttttgaacaaaattaccaattctttggtcctggacattataaagctggctggtgtccatacagtagccaactgctttgtagttcctatggcaactggtatgagtctaactctgtgtttcttaacattacgacacaaaagaccaaaggcaaagtatattatatggccacgaatagaccagaagtcctgctttaaatccatgatcactgcaggttttgagcctgtggtgatagaaaatgttttggaaggtgacgagctgcgtacagacctgaaagcagtggaggctaaagtccaggaacttgggcctgattgcattctgtgtattcattctactacatcctgttttgctccaagggtgcctgatagattagaagaactggctgtgatttgtgctaattatgacattccacatatagttaataatgcttatggagtgcagtcttcaaagtgtatgcatctcattcagcagggggctcgagttggtagaatagatgcttttgttcagagcttggacaaaaattttatggttccagtaggtggtgctataattgctggctttaatgattcattcattcaggaaatcagcaagatgtatccaggaagagcttcagcttcaccttctttagatgtccttattactttattgtcacttggatcaaatggctataagaagctactaaaagaaagaaaggaaatgttttcatatttgtccaaccaaataaagaagttgtcagaagcctacaatgaaagactgttgcatacacctcacaatcccatatctttagctatgacacttaaaacactagatgaacaccgtgacaaagctgtcactcagcttggctcgatgctttttaccagacaggtttctggagccagggttgtgcctcttgggtccatgcaaactgtgagtggctatactttcagaggctttatgtcacatacaaataattacccttgtgcttacctcaatgctgcatcagccatcggaatgaagatgcaggatgtggacctgttcataaagagacttgacaggtgtttaaaggcagtaagaaaagaacgaagtaaagagagtgatgacaattatgacaaaactgaagatgtggatattgaagaaatggctttaaaactagataatgtacttcttgacacataccaggatgcttcttcatgacatgcgaagggtttcttcttgatcatttgaaagaaatgataaggctgtagtacaagcaagcagtttaaagataagacttgagatttttgaattgagaatttcatgggaatattcagtcaaggagcagactttggtctgaactagccattgatgattgttaagtttcccattcttagactgcatcaatccttgtgatccttaacaggttataatatacaattagcatttttctaattgttagaatatctgtcaattaagcatcatgactcagataatttttactagtgtaatgacagtaaaattacttcaattctctttgaaatgtagagtgcttcctcctaaccattctttaccgtttctgatcacacagaattgagaaagatctcttaggccactagttactagttgtttgttgagatgtgtaagtcacagtgtgcctgtaaaatgggcattccccaaggaagcagagtcaaggtataaactttcgttttgactcaaaagcagtgggtctcaactggggatgattcgcttatctgaacagcatctgcagacatttttggttgtcacaactggtgggatgctgttaacatctagaggatagaggccagggtgctactcaacatcctacaatgcatgggacaactcccacaacaaagaattatccagcccaaaatgtcattagtgctgaggttgagaaatactcctctaaagtagataaactccttgagtaaagagaagtttaccatagcaactttcagtagtacttcaaagaagatagctgtataaatgtcatcaaactatactatgtagagaatcttaagtgataaccagggtcacggattccaaacatgtcattataaattgttttatatggtgctcactggtgcatttttccttttggataagggaaaacattattccacttactgtttttgctttaagcagcctgcatatattggttagtttgttcagatgttgtgcacagacatcatcaaaattagctaacatgggtatttttgaacatatttttgccaggaagatgaaaatcacatagtatgataaacaggtgtattcccctctacttgcccatgtgctcatttttctgagtctgaaattccagacttactggctttaacaataatttttgttgttaatttaagaaatagacttacttaagactattttaagaaatagagatgtcatagcctgaagatttactgaagcttctgaacatgccaccatgccaaagctatgtttctcaaacccagctctgtggatcatgttcctaaaagatgctcatggggagaaaatgtttacagacaaataattttgggagctgcctttgcaaacctgcctgttggcatattgaaggctctaagaattccttcactaaataacccagttttaatatatccttatccaaagagaaactcatttttttaaagtgaaatatttgttaacagcccattgaacatacttttaaaaacactatggtagagaatgctgtgttgccttctgggctgcatttttcttattgatttggaattgtaacctatgtatgagaaagggattttctggtattttggtgacgttgtacattgtcccagactgtttgtaaacatgaggtcagacatgtgtaaggtagacgcctatggccactggcttgaccaccttggaagtcaatgactattttgagatgaagtatttaactatgaatatcatgaaggttatttaaaaatgtatttattttatctttggggttcaaacattaaaaaaatttacataggtgtagtaactcatttcaagggaataaatgctggattaaaaagtgaaaaaaaaaaaaaaaaaaaaaaaaaaaaaaaaaaaaaaaaaaaaaaa

SEQ ID NO: 2120 - DNA, 1269 bp, Homo sapiens
atgagcacctcatacggctgcttctggagaaggttcattcatggcattggacgatccggtgatatttctgctgtgcaaccaaaagctgcaggctctagccttttgaacaaaattaccaattctttggtcctggacattataaagctggctggtgtccatacagtagccaactgctttgtagttcctatggcaactggtatgagtctaactctgtgtttcttaacattacgacacaaaagaccaaaggcaaagtatattatatggccacgaatagaccagaagtcctgctttaaatccatgatcactgcaggttttgagcctgtggtgatagaaaatgttttggaaggtgacgagctgcgtacagacctgaaagcagtggaggctaaagtccaggaacttgggcctgattgcattctgtgtattcattctactacatcctgttttgctccaagggtgcctgatagattagaagaactggctgtgatttgtgctaattatgacattccacatatagttaataatgcttatggagtgcagtcttcaaagtgtatgcatctcattcagcagggggctcgagttggtagaatagatgcttttgttcagagcttggacaaaaattttatggttccagtaggtggtgctataattgctggctttaatgattcattcattcaggaaatcagcaagatgtatccaggaagagcttcagcttcaccttctttagatgtccttattactttattgtcacttggatcaaatggctataagaagctactaaaagaaagaaaggaaatgttttcatatttgtccaaccaaataaagaagttgtcagaagcctacaatgaaagactgttgcatacacctcacaatcccatatctttagctatgacacttaaaacactagatgaacaccgtgacaaagctgtcactcagcttggctcgatgctttttaccaaacaggtttctggagccagggttgtgcctcttgggtccatgcaaactgtgagtggctatactttcagaggctttatgtcacatacaaataattacccttgtgcttacctcaatgctgcatcagccatcggaatgaagatgcaggatgtggacctgttcataaacagacttgacaggtgtttaaaggcagtaagaaaagaacgaagtaaagagagtgatgacaattatgacaaaactgaagatgtggatattgaagaaatggctttaaaactagataatgtacttcttgacacataccaggatgcttcttcatga

SEQ ID NO: 2121 - DNA, 6655 bp, Homo sapiens
gatcaagttcgtgaaactggtcttgtacaggttgaaaaatgccttcctaacaggaggcgccaaggagcttaagtgtaactcacacacagtaaagaaaatgacgaaagttcctccggcgtttgatttcagtttcttaaatgacgaagaggccgggaagatccttcaggtgctggaaaggaatgaggagttacagagggccgagaaggacaggatcagcaaacttcagaagacaaagagggatatcagatggcttcagggagtgactggtgaatggtttgaagaaattcaaagaaaaaagttttgcaatgaaacagatgttagccaaatgttaaaacaaccacttacatacaggctaagtaaggagatggcaaaaaatgatccgatagaattacctacatcaagatctaaaaatgtaactaatcaaaaaaagccgacacctttttcttcccggatgagcttcagatcgtcatttgcttccctgttctcattcaggaaatctggaaaggagacttcaaagcttccatcactgggacagaaaggatgtgatggccatgcaggacctcctatgcctgtgaggggagctgctgtgcaggcaaaaatatacaattcacctctggaaaatcatctagttgacagtacatttgtcccaaagccagcagtcatgagggaggagagtggcatgcctccaccgtgggatgcttcactgctggagaatgagtttttccaagttttagatgacttggatagcaaattggctcaggaacagtctgcaagctcagtgaataccagaacacccctcaactatggatcaagaacacagttcggtcacttttattccagtggtaacagacatggtaatatcacagaaaggcacaaaaaacactataatgaaacttccaatatgtctatctatgacatcctaagaccaggaactcctagggaaggttttaaaaccttttctcctaggacaagcacaatttatgatatgtataggacaagggagcccagagtctttaaagaagattatgtgcaaaagaatacttttggcagtacttcgctgtgttttgacagcaggcaacggtcggccttaccagccacagggcatttcacagcaagaagcttacattttccagccacaactcagagcaagagtgggtttataccaccaaggcaccagcagagtccaaagagaactcctttatcatccatcatatggaacagatcagattcctctagagacagggagaaccaggaagagttcctgagggcaccatcaccaatggaaattgatcccgctgacaagtatgtgtatcccaggggttttcaggagaataagagatatgaatcgtaccattcacagaatgtttaccaacgtgttagtttaaatgctcccatggagaatgcaatgagtcccgacacttttgagaactcagagaacatgccattctaccatcaaagcaacacatttaccagatctttcttcagcaatacctttggacgaagcggagaacagaggagatttggacaaggtcctttttggggccaagagaaaggacattctttctggtctgactttcatcgaagcaggaaatcattcagttcttctgacagagactttgaaatgatttccatggaagcaaatagtgtatcagccattcatggccataatgtttcttctgaacactgggaatcattttcttctggttatggaacagatgtttccagaggccaagaagagccacatccttggcagtttgattttcagagatccacactggatagcatggtggtatcacatggtaatgagacccagttgactcctcattttggcacaccaaatgtttgctccatgactggttcaagctatcacgtcaaatctagtgagttggtaagtcaacaggacagttctcctgtagaagtacatataaacaaagaagcttcctcatttggaattgctcagactctagcatcctcattcaaaacttccttttcccagatttctgatgacagaaggaatcctcagagtcccaacttgcagaatcccacagtcactttgcagaaaatttttccaaataagcctgcctctcatccaatgagaagccatacagaagtcactgtgaccaacagcaattcagttgactctctgcctcttgccaaaagccagcccaatatcttggtcacagaagtaaataatgagaaagacttaaatgaatctatttcagaagaagacaaacagctaagcaagatggaccagacaaacaaggcaggtgaaataccccaacctgtttcacagacagggatctcaaactctttacctgattttcaaaatcccttatcccaggactcagccaagagcaacgggtttggttttaatgcatctaccataataagttcaaaaaagtcacccagagtcttttccaggaaagatacctccaaaatgtatataccgcacacagataaatccaatgacattaaacaagataagaggtttactgaaaacagaaaacttggctcaacagcttcccttcctttcattcaggaacacagaacaccaccatctttccccaggacagaccaaggttgtcaccaggaattaactgtaaataatgaagatatttcaagaattattacaaataaccactggagctctgcactgactgatactcaaaatgcacaatactcaaaatgcaagttaactcctggccacaagacctcgtgtgattctttagatctgtcatcagctgcactaccagattcctcaccatcaaagaattcttcccttgatgctcctgtggttccatctactacagtgttctccaggagaagtccttcagacaaagatccatcgctaggagaaagagaagaaaaagacaatgctgggaagaaccaaaagaatcagtttattgtaagccactcagaaaaccaagagagaaatgatagtcctgtgcctacacatgatgaagtggttgatgtcaaatgccattcacactctccttttaggaatgaaagaggaaaaggaaaaataaggcatcatatatcctgtattgaaaagttaagcaaaacagaaagtatatcagtacccaccagtgatcacaggagcctcattgaagcaaatcaaagcaattccaaagtttctgaacttgacacaatttattgtaccttgccaagaaaatcaagcagttttctcatacatggcaggcagtcaggaagtaaaataatggctgcttcattgaggaatgggccacctcccttccaaatcaaaaataatgtggaagatgcaatggggaactatatgttaaacaaatttagtcccagttctcctgagtcagcgaatgaatgttccaaagtcctttcagactcagccctggaagcacctgaagccacagagagaatgacaaatgtaaaaagcagtggatctacttccgttagaaaaggaccacttccattcctcatcaacagggctatgtcatgtccctcaggggagccacatgcctcaactggaagagaaggaagaaaaaagccattgacctcaggcatggatgcttctgagctaacaccaagggcttgggagagaatcattagccctgtggaaagtgactcatctgttagagattgttctttaaccaaaagacaacaccaaaaggaaaacttccaagaatacactgagaaagagggtaaaatggctgcctccaggagaagtgtatttgctctttcaaatgaagaccctttacctttttgctcagacttgtcaggaaaagaacgtgggaaaacattacataaagttaagacgactagtacgttttctgtttctggtgatgaagataatgtaaaatgtctggaggtggtctcaatatattacactctaccgaggaaacccagcaaaaaattctgtaacctccttcaacagtatacacaaaatactaatttacttatagaatcacctcaagtggagactgaaacatttcctaacgctttagaaaaagacaaacagaattattctacacgagagcagtcaggaacaccttcatgtgaaaatctaaagatgtccgtcaactctgatcagacgctcaccactgaaaatatgactgccttccgattatcaaatagggggcccctagctcctacattacaggaaatggcttctgttgaggcagctgtttctcttcctgaagaggaatctaaagctagagagattttttcagataatttagctaaaacacctctaggtgattcagaaaacaagaaggaaagaggcaaaaagttgcaaagtgaaaccctgcatacttcattgatgcttcagagaaaaaatgtatccgaagaaaaatctgaaaattgtcaacaatccattaattcaagtaacagtggtccctctagtcttccagctctttcagaagttaatattggaaattcccaaactagaagaagttcttgggagtgtacagggagtggtagagccattccatttactggaagtggcaagtgtccccagaaagatcacacatccacagctgtaggtgatggctccagtggatcacagcctagggaaggcagaggggacattggaaccaactgccaaaaaatgactaataaaacactttctcactcagagagtcaagtctttgcccttactccagcattgcataaactacagcttggtgaggagactcagtcagatgaaccaaacttagagagtctgcagtctgaaccaagagaattacctcaaagaagtcaggaggcaaatatgacagagagcaggaaggctgaagatgaaatgcagaagtcagcttgggatcaaccttcacttcctgaaggaaacaaaaataaaaccaacttggatgacctagtaaagggggaaaatagatcttcagttaaacacagattggcagccatgtctaaagccagcagaaaattcccagctaaagatgtaagccccagaagacatgtagctactatcttcccccaaagtggaagcagatctggctttgaccatttatctcttggcacagtggagtgcaacccactgttccctgagcctactccaaaatctgcagagtccattggcgaaagcaggttgagtgagaacagaaagcatgtgaagaaatccgagaaccttctccccattactgtactacccaacagagaaccttctacacacgtcagcaaccagaagtctaacagcatttcacaacgacatcagaatgagtttaaaaacgtctcagaatcaccatcaaagcatgagaattctaaagacgtcacagcagctcagaatttagtaagagaatcaggagccccatcacccatcacattcaccagcctcagggaagcagaattctctgacaatcagaggaggctgagccctccttttccactggagcctgcacagaaatctagagtaagcagtccactggccagttttctgcagcaacaaaggagtgcttcatctctggagtgggaacctgagccacacctctatcgttcaaagagtttaaaaagcattaatgttcatggcgatctactacgaaaaagccatcctccaaaagtcagggagcgccatttttctgaaagcacttctattgacaatgccctgagtcgactgacccttgggaatgaattctctgtcaacaatgggtacagtcgaagattcagatctttttctgaactcccctcctgtgatggaaatgaaagttgggcttatcgcagcgggacaaaaacaggtcccaggtctgcaatatctatatacagacctatcgactatgggatctttgggaaagaacaacagttagctttcttagaaaatgtaaagaggtcacttacacaaggaagattatggaaaccaagttttcttaagaaccctggcttcctaaaagatgatttgaggaaccctcccaacccctcagagtcattaagctcaaattctcccagtagtcaggtgccagaagatggcttatctccaagtgaaccgcttaatatctatgaggatgacccagtggactcagattgtgacacagacacaaccacagatgatgaatactacctggatgaaaatgacaaagagtcagaactgtgaggctttttcaataaaatgctttacttttttcaccaaaagcttataatggaactaaggtgtacatgtgcatgtgcatggaaggataaaagatctagtctgggcagtgtctgctctgaaatgtcccacatctccttttttttcctccacaccctatatagacacttcctgaatgctagaacaatgaattcttgttttgagagagtctctgctattttctatctctgtaaatgttcttagcctgcctttccaccactcccacttaatccctgattcactgtctgatttgggctttctgctttacttccctcctaacatttttcatctttaattgtgatttacaaccctaatatcccaggcacatacaaaacttatgaattacccagcacaactgtgaaactctgtattgcttcttccggtccacaccctatactcatgacattaaataaaaggtagggatgataacagtggggtaaatattatcatcctgtttgactcatgaacatttaggaagtttaaggtggtgatcttctctttcaaacaaagataaaggaatttattttttaacctgagaaactgattgcaaaaagg

SEQ ID NO: 2122 - DNA, 1743 bp, Homo sapiens
ggcgcggggacgcgggtttctgcctcaggccctgccctgctctactctgcgctctctgcccgcgccgccgccgcctcagcctcggccctgcgctgcgcgcccggcccgtgctgccatggcctgccgcccgcgaagcccgccgaggcatcagagccgctgcgacggtgacgccagcccgccgtcccccgcgcgatggagcctgggacggaagcgcagagccgacggcaggcgctggaggcccgaagacgccgaggaggcagagcaccgcggcgccgagcgcagacccgagagctttaccactcctgaaggccctaaaccccgttccagatgctctgactgggcaagtgcagttgaagaagatgaaatgaggaccagagttaacaaagaaatggcaagatataaaaggaaactcctcatcaatgactttggaagagagagaaaatcatcatcaggaagttctgattcaaaggagtctatgtctactgtgccggctgactttgagacagatgaaagtgtcctaatgaggagacagaagcagatcaactatgggaagaacacaattgcctacgatcgttatattaaagaagtcccaagacaccttcgacaacctggcattcatcccaagacccctaataaatttaagaagtatagtcgacgttcatgggaccagcaaatcaaactctggaaggtggctctgcatttttgggatcctccagcggaagaaggatgtgatttgcaagaaatacaccctgtagaccttgaatctgcagaaagcagctccgagccccagaccagctctcaggatgactttgatgtgtactctggcacacccaccaaggtgagacacatggacagtcaagtggaggatgagtttgatttggaagcttgtttaactgaacccttgagagacttctcagccatgagctaactgccccctggcggccaggaagagaaacagctcctccccgactaggtggaaggctggccaggcaccaagcatgtgtgtgcacttgtacctggtggtttctctgttagcagtccattagctcatgctgaattatttttgccttactttcttaagaaacattaattttatgtatagtgagtatattttgcatgttttaaattgtaaatggagctaagtccaagaaagtacttgaagctctcttccagcgagcttaattgcgtaatccctgttgtcctccagggtaagctgacacgtctacataactggttttccacaggcatcttcagttattgcttgtcaggtggactgttttggatttaaccatgtaatccatgggaccaattgagagtcagctacttttataggcatcaaagtattctcagacacctttaatatctttatggaaacttaatttttggccttttatcaatatgtcataacagcattctgaagtcagacattgttaaattgagctattaaactaatgagttttatgtaagttatatggtcttaatttggtacttgtaaatagcactagttagactctttagaatactccaagagttagggcagcagagtggagcgatttagaaagaacattttaaaacaatcagttaatttaccatgtaaaattgctgtaaatgataatgtgtacagattttctgttcaaatattcaattgtaaacttcttgttaagactgttacgtttctattgcttttgtatgggatattgcaaaaataaaaaggaaagaaccctcaaaaaaaaaaaaaaaaaa

SEQ ID NO: 2123 - DNA, 5239 bp, Homo sapiens
agccatgcccacgaactttacggtggtgcccgtggaggctcacgccgacggcggcggggacgagactgccgagcggacggaggctccgggcacccccgagggccccgagcccgagcgccccagcccgggagatggaaatccaagagaaaacagcccattcctcaacaatgtcgaggtggaacaagagagcttctttgaagggaagaacatggcacttttcgaggaggagatggacagtaaccccatggtgtcctcgctgctcaacaagctggccaactacaccaacctgagccagggcgtggtggagcacgaggaggacgaggagagccggcggcgggaggccaaggctccgcgcatgggcaccttcatcggcgtctacctgccgtgcctgcagaacatcctgggcgtcatcctcttcctgcgcctgacgtggatcgtgggggtggctggtgtcctggagtccttcctcatcgtggccatgtgctgcacatgtacaatgctgaccgccatttccatgagtgcgatcgctaccaacggtgtggtcccagctggcgggtcctactacatgatatcgcgctcgctgggacccgagtttggaggcgctgtcggcctctgcttctacctgggcacgacgtttgcaggggccatgtatattttggggaccatcgagatttttctgacgtacatctccccgggtgcggccatcttccaggcggaggctgcaggtggcgaggcggccgccatgctgcacaacatgcgtgtgtacggcacgtgcacgctcgtgctcatggccctggtggtcttcgtgggcgtcaagtatgtcaacaagctggcgctggtcttcctggcctgcgtcgtgctgtccatcctggccatctatgccggcgtcatcaagtctgccttcgaccccccggacatcccggtctgcctcctggggaaccgcacgctgtcacggcgcagcttcgatgcctgcgtcaaggcctacggcatccacaacaactcagccacctccgcgctctggggcctcttctgcaacggctcccagcccagcgccgcctgtgacgagtacttcatccagaacaacgtcaccgaaatccagggcatcccgggcgcggccagtggtgtcttcctggagaacctgtggagtacgtacgcgcacgcgggggcgtttgtggagaagaaaggtgtgccctcggtgcccgtggcagaggagagccgtgccagcacactgccctacgtgctcaccgacatcgcggcctccttcaccctgctggttggcatctacttcccttccgtgaccggtatcatggcgggttcaaaccggtccggggacctcaaggatgcacagaagtccatccccacggggaccatcctggccatagtgacgacgtctttcatctatctctcctgcattgtgctgtttggggcctgcattgaaggcgtggtcttacgagataagttcggggaggccctgcaggggaacctggtcatcggcatgctggcctggccctccccctgggtcatcgtcatcggctccttcttctccacctgcggtgccggcctgcagaccctcacgggggcaccgcgcctactgcaggccattgcccgtgacggcatcgtccccttcctgcaggtgtttggccacgggaaggccaacggggagcccacgtgggcgctgctgctgacagtcctcatctgcgagactggcatcctcatcgcctctctggacagcgtggccccgatcctctccatgttcttcctcatgtgctacctgttcgtgaacctggcctgcgccgtgcagaccctgctacgtacccccaactggcgtccacgcttcaagttctaccactggaccctgtcctttctgggtatgagcctgtgcctggcgctgatgttcatctgctcctggtactacgcgctgtccgccatgctcatcgctggctgcatctacaagtacatcgagtaccgcggggccgagaaggagtggggcgatggcatccgtggcctatccctgaacgccgcccgctacgccctgctgcgcgtggagcacggtcccccccacaccaagaactggaggccccaggtgctggtgatgctgaacctggacgcggagcaggccgtgaagcacccccgcctgctgtccttcacgtcgcagctgaaggccggcaagggcctgaccatcgtgggctcggtgctggaggggacgtacctggacaagcacatggaggctcagcgggccgaggagaacatacggtccctaatgagcacagagaagaccaagggcttctgccagctggtggtctcgtccagcctgcgggatggcatgtcccacctgatccagtcggccggcctgggcggcctgaagcacaacacggtgctcatggcctggcccgcatcctggaagcaggaggacaaccccttctcctggaagaactttgtagacaccgtccgcgacaccaccgccgcgcaccaggctctgctggtggccaagaacgtcgactcgtttccgcaaaaccaggagcgcttcggcgggggccacatcgacgtgtggtggatcgtgcacgacggcggcatgctcatgctgctgcccttcctgctgcgccagcacaaggtgtggaggaagtgccggatgcgtatcttcaccgtggcccaggtggacgacaacagcatccagatgaagaaggacctgcagatgttcttgtatcacttgcgcatcagcgccgaggtggaggtggtggagatggttgaaaacgacatatctgctttcacctacgagaggacactaatgatggagcagaggtcgcagatgctgaagcagatgcagctgtccaagaacgagcaggagcgagaggcccagctgatccacgacaggaacaccgcgtcccacaccgcggcggcagccaggacccaagcgccgcctacgccagacaaggtgcagatgacctggaccagggagaagctgatcgctgagaagtacaggagcagagacaccagcctatccggtttcaaagacctcttcagcatgaagccggaccagtccaacgtcaggcggatgcacacggctgtgaagctcaatggcgtcgtcctcaacaagtcccaggatgcgcagctggtcctgctcaacatgccaggtcctcccaaaaaccggcagggagacgagaactacatggagtttcttgaagtcctgaccgaggggctgaacagagtcctcctggtcaggggtggcggccgggaggtgatcaccatctactcctaatgcccaacagcatcacggcactctgggacaggcacggaggacggcgtgggcagcctgggcctgggcttggcccagggaaccagacggcagacacacctgtcccccagtgatgccacccaagctgcccatggggcttcctacggaagtttctaggcccgtcacctagggctctcctgttcagccttaacaggctcagcaaatcagggcgtggctggacgatttccttgcatctgagggcagacgctgctaccggagtgacctggacgtggccagatcttctcgcaggtcacaagaagccagtgagcccttgccttggtttctggaagttcttttccttggctggatttacccagtggttaggttgcatttctaccccatccagaacattcttggaagagcacccggagctgaagctgtccctgatgatgaaggtgaaacgtcagccctggccatggctccgctcagggccccggtcacctccgagtcactctgttccttgactgtctttgtgtttctgtacctcaaggcactgaagctggaggactctgtccatgcccgtgtcaccctcgtgtgggagcctctgggctcggcaggtccacatttcatgagctgaggcgtgggccagggccatctggaaagggaactcggcttttccagaacgtggtggatcatctgtcgggtgtgtggtgaacacgttcagttcatcagggcctacgctccgggaaggggcccccagctgtggctctgccatgccgggctgtgtttgcagctgtccgagtctccatccacctttagaaaaccagtcacttcttttcataagcactgacagggcccagcccacagccacaggtgcgatcagtgcctcacgcaggcaaatgcactgaaacccaggggcacacgcgcgcagagtgaacagtgagttcccccgacagcccacgacagccaggactgccctccccaccccaccccaccccaggagcacggcacacagttcagcctctgagctggctcacacgtgccatccccaccccggtgctccagggaaggaggacacggacccgacgtgggaggtcctcaggcagcagtggcgcctggtgtcaggtctgtctggctgagtcccgggcgtcccctgccatggcctgtgccttgcatggaggcggcggtggcactgaagagatagctttcaagggcccaacactttgcacttcggctggctgtgagtttctgctttgtaggttgtggtcacatttgcaggctgcgggcagtggcaccgacttgggcctccctttctatgtggcatatttatttatttaaacaccccagggagttacgtggtaacaaggttgtccataaagaggttgcttctatatactagaggccccagatggcaggccttgggctacgtctggcttgcatggtctcccaagggaatcaaccccatcaacaaagttcaaatcggggcagaggctgcacttgtgcccccagatgtttctgaggagccagattagggctggcattgctgtagagtgacggctgctgcccagagcgtgtcccagacatcacagcggggctcagcagttcccacagcctctgcctgccttggctaagcatgagttaagcagcaaaacgctcctccatgtctggatggggccggcaggtcctgtgtcccctgcacctggaggagagcaggctagaggcacagcggccacatggtgctggctctgaacgttggttggtggctggaaaacagccctgcttctgagggccgctcagttctgcacacgaaaccacctcctgagggctcagctctgcccccgccctgggctgcagcctctgcacgcaagcaccaggcatcctttgtgttgtcaactccgtgtaaccagtaactacagccatttacaattgactccgtttccttttgtaggtttccctgtctgtctgtgttagtagaaaaataaaatcctatgaaatctgaaaaaaaaa

SEQ ID NO: 2124 - DNA, 4639 bp, Homo sapiens
tcagtctcgccggcggcccccgctcccggatccccagcgccctggccaagaagcttcctcggctccccctcttccctctccctgacacggttgtgcagagggcgcggtggctcagatacaggatttcgacatattggccggtttgctctcgagctcctgggctcaagcgatctgcccgctttagcctcccaaagtgatgggattacaggcgtgagccaccgtgcctggccataatttttaaaaatgtctagtcagatggcgagtaacccatgggccaggtagcgttctatgccaaccttgaatgccatcaggaagtcactggacagcaaactcttccaagatcataacttggctgttggagcaacctggaaaagaagaaaaaagaaaaaccatggcaaaagtaaatagagctcggtctacctcccctccagatggaggctggggctggatgattgtggctggctgtttccttgttaccatctgcacacgggcagtcacaagatgtatctcaattttttttgtggagttccagacatacttcactcaggattacgcacaaacggcatggatccattccattgtagattgtgtgaccatgctctgtgctccacttgggagtgttgtcagtaaccatttatcctgtcaagtgggaatcatgctgggtggcttgcttgcatctactggactcatcctgagctcatttgccacgagtctgaagcatctctacctcactctgggagttcttacaggtcttggatttgcactttgttactctccagctattgccatggttggcaagtacttcagcagacggaaagcccttgcttatggtatcgccatgtcaggaagtggcattggcaccttcatcctggctcctgtggttcagctccttattgaacagttttcctggcggggagccttactcattcttgggggctttgtcttgaatctctgtgtatgtggtgccttgatgaggccaattactcttaaagaggaccacacaactccagagcagaaccatgtgtgtagaactcagaaagaagacattaagcgggtgtctccctattcatctttgaccaaagaatgggcacagacttgcctctgttgctgtttgcagcaagagtacagttttttactcatgtcagactttgttgtgttagccgtctccgttctgtttatggcttatggctgcagccctctctttgtgtacttggtgccttatgctttgagtgttggagtgagtcatcagcaagctgcttttcttatgtccatacttggagtgattgacattattggcaatatcacatttggatggctgaccgacagaaggtgtctgaagaattaccagtatgtttgctacctctttgccgtgggaatggatgggctctgctatctctgcctcccaatgcttcaaagtctccctctgctcgtgcctttctcttgtacctttggctactttgatggtgcctatgtgactttgatcccagtagtgaccacagagatagtggggaccacctctttgtcatcagcgcttggtgtggtatacttccttcacgcagtgccatacttggtgagcccacccatcgcaggacggctggtagataccaccggcagctacactgcagcattcctcctctgtggattttcaatgatatttagttctgtgttgcttggctttgctagacttataaagagaatgagaaaaacccagttgcagttcattgccaaagaatctgatcctaagctgcagctatggaccaatggatcagtggcttattctgtggcaagagaattagatcagaaacatggggagcctgtggctacagcagtgcctggctacagcctcacatgaccaaaggccttgagccccagaatcttcaggtttgagagaggtggggccaccagattcttcatgtttctgaaactttttattttggcagaaggattgccttccaaggaaattattattattgttttgttaacatattaatatttataagggaaaacagcacataataaggaaagctggactagcccagagccttctcatttgggatttgtgctcataactgaactcgtatcttttggtcaatgggcatagctctgtaagaaatgtaaggacacagctgatataattagctgtaattagggataatttcaaagcataaccaaagcagatgacactgggcagcagctttgttccagtctcaggcccttcatgttccctcctcagaaagaaaatggaaacattaacgtgtagctttgcttaccttgttctggttagagaagggaggtcagcttgggtgtggtggtgaagagtgaagatgccatactttttcatggtggagtttctcattagggttttacttgggattgttaaagaatacttgagattcttcaaaaagtggtgattaatatagaaagaaactcttattttttttttctcttagtcttccagccagcccttgcctctgcccaagggtagacaccactatgagaatccaaataatcatggaatgccatggttggaatagatcttaaagggcatctggtaagatccatttgaaattgtccactggaaaccgaaagctcttttcctaagactgggttccaggctctcacatttgttaccatcacatataatacttactctaaatttagcagaacacacttagtcacaaggacaacctctcaatcttacctgaaatgtcaacaacaccaaaacttcccgtcttttaccttcagagaagaagctcttacttagactgcagacgcattcctgttaggttggaaaaatgttggcagtattccaattgggcaggaactgaattcttgaatcagcaggtctctggtgagagttttctttgcagatcagacatttagttttatcattacccaaaagaggattggagggagtcagttgtctgaaaaatattatcctagagatattctaaaggtgagattcctttctccctgtgttaattcttgttccactatccactgctcttcatctctttatagataataattagaaatctactcattggattataagtttattcattctcaaatactccacttttctatggtttgggataatttctgagtcttcagattgaagagggaaggcatggagggaagaaaaagtccagatcccccagcttgtttccaaccattttaagtccaaagaattataatcctgaatctcacagtgtgtcacacctgtaataggagtaaattatgcaatcaattttaattaccaggagtttaaaatccaaatgtcaaggaactgttttgaccctgaaggctatttaatccactgtcccctacaaggcctcacaagtgctgggggaaaaaaaacagcaatgaggatgatcctgagttaatgtgtatgctccgcaagagagcttgcctataccttgattatttcataaaatcacatgttaatacattgctttcagaatgaaatactgacttgatctgataggagaaaatggtaatatttcatagttgttttccaaagacaaatttaaatgttgtctgttatctccttacttagtttaagaatttagttttgaaccccattgactttgtcatttgcaattttaaaaatatttgggactgggcatggtcgctcacgcctgtaatcccagcactttgggaggctgaggcgggtggatcatgaggtcaggagatcaagaccatcctggctaacatcgtgaaactccgtctctactaaaaatgcaaaaaattagccaggcgtggtggcgggcgcctgtagtcccagctactcatgaggctgaggccggacaatcgcttgaacccaggaggtggaggttgcagtgagccaaaatcatgccactgcactccaccctgggcgacagagcaagactccatctcaaaaaaaaaaaattggaaggtatctgtaaaatgtcaaagttaagatgaagttatatctgtttggaatagcactttgccctaaatatcatttcttgaattttcaagcctaaagatgtttaaaaatatgaatagttacaaatattcttatacatattttttatcatgatcacaacaaaattttgtttatgtggttctgcaatataatttctgtgaagtattacaagtatttatgaaaaataagcatagtgatcagaaattttaaagattttgtataaaaacatttgggagatttgactttatacatgcatagatttgcattttactttcccttttgaggcagcatttttagaaaatcagtaagaaaaatgtacatcttaaggtctactattttacatttctacacagaattttagtgttaatgttccatgtgtctatactgtttatttcaaaactgagaaattcatgggaatgatgtattttgtggaatcaagaacaaaattatagtgggataattttacatcttaaatatttctttctactactgtaagctctactttggaattatctgagtagaaaatcagaagacattatctaactttgtagatacactgtatgattgggctttttgttcagattgtaatttcattaatagatgaaatatttatgctaatattttcttatttcaaaagcaaaataaaatgaatttattgtcctgtgaaaaaaaaaaaaaaaaaaaaaa

SEQ ID NO: 2125 - DNA, 2749 bp, Homo sapiens
cacacacacacatacacagaatcctcagataacaggaggcaataaatccaacagcacatccacgttcagagaacagtgtccctgctgtcttgctaacagctgccaatacctcactgagtgcctcacaccaacatgggctccaagtgagtttccttcgtctgggcagactccctcccctcttccataaaggctgcaggagacctgtagctgtcacaggaccttccctaagagcccgcagggaaagactgccccagtccggccatcaccatgctccggaccattctggatgctccccagcggttgctgaaggaggggagagcgtcccggcagctggtgctggtggtggtattcgtcgctttgctcctggacaacatgctgtttactgtggtggtgccaattgtgcccaccttcctatatgacatggagttcaaagaagtcaactcttctctgcacctcggccatgccggaagttccccacatgccctcgcctctcctgccttttccaccatcttctccttcttcaacaacaacaccgtggctgttgaagaaagcgtacctagtggaatagcatggatgaatgacactgccagcaccatcccacctccagccactgaagccatctcagctcataaaaacaactgcttgcaaggcacaggtttcttggaggaagagattacccgggtcggggttctgtttgcttcaaaggctgtgatgcaacttctggtcaacccattcgtgggccctctcaccaacaggattggatatcatatccccatgtttgctggctttgttatcatgtttctctccacagttatgtttgctttttctgggacctatactctactctttgtggcccgaacccttcaaggcattggatcttcattttcatctgttgcaggtcttggaatgctggccagtgtctacactgatgaccatgagagaggacgagccatgggaactgctctggggggcctggccttggggttgctggtgggagctccctttggaagtgtaatgtacgagtttgttgggaagtctgcacccttcctcatcctggccttcctggcactactggatggagcactccagctttgcatcctacagccttccaaagtctctcctgagagtgccaaggggactcccctctttatgcttctcaaagacccttacatcctggtggctgcagggtccatctgctttgccaacatgggggtggccatcctggagcccacactgcccatctggatgatgcagaccatgtgctcccccaagtggcagctgggtctagctttcttgcctgccagtgtgtcctacctcattggcaccaacctctttggtgtgttggccaacaagatgggtcggtggctgtgttccctaatcgggatgctggtagtaggtaccagcttgctctgtgttcctctggctcacaatatttttggtctcattggccccaatgcagggcttggccttgccataggcatggtggattcttctatgatgcccatcatggggcacctggtggatctacgccacacctcggtgtatgggagtgtctacgccatcgctgatgtggctttttgcatgggctttgctataggtccatccaccggtggtgccattgtaaaggccatcggttttccctggctcatggtcatcactggggtcatcaacatcgtctatgctccactctgctactacctgcggagccccccggcaaaggaagagaagcttgctattctgagtcaggactgccccatggagacccggatgtatgcaacccagaagcccacgaaggaatttcctctgggggaggacagtgatgaggagcctgaccatgaggagtagcagcagaaggtgctccttgaattcatgatgcctcagtgaccacctctttccctgggaccagatcaccatggctgagcccacggctcagtgggcttcacatacctctgcctgggaatcttctttcctcccctcccatggacactgtccctgatactcttctcacctgtgtaacttgtagctcttcctctatgccttggtgccgcagtggcccatcttttatgggaagacagagtgatgcaccttcccgctgctgtgaggttgattaaacttgagctgtgacgggttctgcaaggggtgactcattgcatagaggtggtagtgagtaatgtgcccctgaaaccagtggggtgactgacaagcctctttaatctgttgcctgattttctctggcatagtcccaacagatcggaagagtgttaccctcttttcctcaacgtgttctttcccgggttttcccagccgagttgagaaaatgttctcagcattgtcttgctgccaaatgccagcttgaagagttttgttttgttttttttccatttattttttttttttaataaagtgagtgatttttctgtggctaaatctagagctgctaaaagggctttaccctcagtgaaaagtgtcttctattttcattatctttcagaaacaggagcccatttctcttctgctggagttattgacattctcctgacctcccctgtgtgttcctaccttttctgaacctcttagactcttagaaataaaagtagaagaaagacagaaaaaataactgattagacccaagatttcatgggaagaagttaaaagaaactgccttgaaatccctcctgattgtagatttcctaataggaggggtgtaatgtgacattgttcatacttgctaataaatacattattgcct

SEQ ID NO: 2126 - DNA, 3297 bp, Homo sapiens
tgccggcgctctctgcgtggttcttcttctcggccgctgaaacccccgcggctgcttcctgggaaggtcgtgagtcccgctgagctgtccccggtgccgccgacccgggccgtgtgcccgtggctccagccgctgccgcctcgatctcctcgtctcccgctccgccctcccttttccctggatgaacttgcgtcctttctcttctccgccatggaattctgctccgtgcttttagccctcctgagccaaagaaaccccagacaacagatgcccatacgcagcgtatagcagtaactccccagctcggtttctgtgccgtagtttacagtatttaattttatataatatatattatttattatagcatttttgatacctcatattctgtttacacatcttgaaaggcgctcagtagttctcttactaaacaaccactactccagagaatggcaacgctgattaccagtactacagctgctaccgccgcttctggtcctttggtggactacctatggatgctcatcctgggcttcattattgcatttgtcttggcattctccgtgggagccaatgatgtagcaaattcttttggtacagctgtgggctcaggtgtagtgaccctgaagcaagcctgcatcctagctagcatctttgaaacagtgggctctgtcttactgggggccaaagtgagcgaaaccatccggaagggcttgattgacgtggagatgtacaactcgactcaagggctactgatggccggctcagtcagtgctatgtttggttctgctgtgtggcaactcgtggcttcgtttttgaagctccctatttctggaacccattgtattgttggtgcaactattggtttctccctcgtggcaaaggggcaggagggtgtcaagtggtctgaactgataaaaattgtgatgtcttggttcgtgtccccactgctttctggaattatgtctggaattttattcttcctggttcgtgcattcatcctccataaggcagatccagttcctaatggtttgcgagctttgccagttttctatgcctgcacagttggaataaacctcttttccatcatgtatactggagcaccgttgctgggctttgacaaacttcctctgtggggtaccatcctcatctcggtgggatgtgcagttttctgtgcccttatcgtctggttctttgtatgtcccaggatgaagagaaaaattgaacgagaaataaagtgtagtccttctgaaagccccttaatggaaaaaaagaatagcttgaaagaagaccatgaagaaacaaagttgtctgttggtgatattgaaaacaagcatcctgtttctgaggtagggcctgccactgtgcccctccaggctgtggtggaggagagaacagtctcattcaaacttggagatttggaggaagctccagagagagagaggcttcccagcgtggacttgaaagaggaaaccagcatagatagcaccgtgaatggtgcagtgcagttgcctaatgggaaccttgtccagttcagtcaagccgtcagcaaccaaataaactccagtggccactaccagtatcacaccgtgcataaggattccggcctgtacaaagagctactccataaattacatcttgccaaggtgggagattgcatgggagactccggtgacaaacccttaaggcgcaataatagctatacttcctataccatggcaatatgtggcatgcctctggattcattccgtgccaaagaaggtgaacagaagggcgaagaaatggagaagctgacatggcctaatgcagactccaagaagcgaattcgaatggacagttacaccagttactgcaatgctgtgtctgaccttcactcagcatctgagatagacatgagtgtcaaggcagagatgggtctaggtgacagaaaaggaagtaatggctctctagaagaatggtatgaccaggataagcctgaagtctctctcctcttccagttcctgcagatccttacagcctgctttgggtcattcgcccatggtggcaatgacgtaagcaatgccattgggcctctggttgctttatatttggtttatgacacaggagatgtttcttcaaaagtggcaacaccaatatggcttctactctatggtggtgttggtatctgtgttggtctgtgggtttggggaagaagagttatccagaccatggggaaggatctgacaccgatcacaccctctagtggcttcagtattgaactggcatctgccctcactgtggtgattgcatcaaatattggccttcccatcagtacaacacattgtaaagtgggctctgttgtgtctgttggctggctccggtccaagaaggctgttgactggcgtctctttcgtaacatttttatggcctggtttgtcacagtccccatttctggagttatcagtgctgccatcatggcaatcttcagatatgtcatcctcagaatgtgaagctgtttgagattaaaatttgtgtcaatgtttgggaccatcttaggtattcctgctcccctgaagaatgattacagtgttaacagaagactgacaagagtctttttatttgggagccagaggagggaagtgttacttgtgctataactgcttttgtgctaaatatgaattgtctcaaaattagctgtgtaaaatagcccgggttcctttggctcctgctgaggtcccctttccttctgggctgtgaattcctgtacatatttctctactttttgtatcaggcttcaattccattatgttttaatgttgtctctgaagatgacttgtgatttttttttcttttttttaaaccatgaagagccgtttgacagagcatgctctgcgttgttggtttcaccagcttctgccctcacatgcacagggatttaacaacaaaaatataactacaacttcccttgtagtctcttatataagtagagtccttggtactctgccctcctgtcagtagtggcaggatctattggcatattcgggagcttcttagagggatgaggttctttgaacacagtgaaaatttaaattagtaacttttttgcaagcagtttattgactgttattgctaagaagaagtaagaaagaaaaagcctgttggcaatcttggttatttctttaagatttctggcagtgtgggatggatgaatgaagtggaatgtgaacttcgggcaagttaaatgggacagccttccatgttcatttgtctacctcttaactgaataaaaaagcctacagtttttagaaaaaaaaaaaaaaa

SEQ ID NO: 2127 - DNA, 3685 bp, Homo sapiens
gcttccggaagcgggcgactcgcagctccacgcgacgccgaggggctccgcgccgggaccgggcgggtgctcggagtttcggggaccgcacgggaccgagggcaggaggagacatcacagctttcccagatcgggaggaaaaatatggaatgtgttttaccgctgactgaacacaaccaaatgaactgtcctgacagtagtttgcaaaccagcagctagcagtttgtccagcctctaacattgtccagcactttccagagcaaactcactgtttacaagaactcttggccttacgaagtttataacctcaagctttgtttatttaaaatattcctgcaaaagaaaagtacccggcacccactttccaaaatggccatggatgagtatttgtggatggtcattttgggtttcatcatagctttcatcttggccttttctgttggtgcaaacgatgttgccaactcctttggtacagccgtgggctctggtgtggtgaccttgaggcaggcatgcattttagcttcaatatttgaaaccaccggctccgtgttactaggcgccaaagtaggagaaaccattcgcaaaggtatcattgacgtgaacctgtacaacgagacggtggagactctcatggctggggaagttagtgccatggttggttccgctgtgtggcagctgattgcttccttcctgaggcttccaatctcaggaacgcactgcattgtgggttctactataggattctcactggtcgcaatcggtaccaaaggtgtgcagtggatggagcttgtcaagattgttgcttcttggtttatatctccactgttgtctggtttcatgtctggcctgctgtttgtactcatcagaattttcatcttaaaaaaggaagaccctgttcccaatggcctccgggcactcccagtattctatgctgctaccatagcaatcaatgtcttttccatcatgtacacaggagcaccagtgctcggccttgttctccccatgtgggccatagccctcatttcctttggtgtcgccctcctgttcgctttttttgtgtggctcttcgtgtgtccgtggatgcggaggaaaataacaggcaaattacaaaaagaaggtgctttatcacgagtatctgacgaaagcctcagtaaggttcaggaagcagagtccccagtatttaaagagctaccaggtgccaaggctaatgatgacagcaccatcccgctcacgggagcagcaggggagacactggggacctcggaaggcacttctgcgggcagccaccctcgggctgcatacggaagagcactgtccatgacccatggctctgtgaaatcgcccatctccaacggcaccttcggcttcgacggccacaccaggagcgacggtcatgtgtaccacaccgtgcacaaagactcggggctctacaaagatctgctgcacaaaatccacatcgacaggggccccgaggagaagccagcccaggaaagcaactaccggctgctgcgccgaaacaacagttacacctgctacaccgcagccatttgtgggctgccagtgcacgccacctttcgagctgcggactcatcggccccagaggacagtgagaagctggtgggcgacaccgtgtcctactccaagaagaggctgcgctacgacagctactcgagctactgtaacgcggtggcagaggcggagatcgaggcggaggagggcggcgtggagatgaagctggcgtcggagctggccgaccctgaccagccgcgagaggaccctgcagaggaggagaaggaggagaaggacgcacccgaggttcacctcctgttccatttcctgcaggtcctcaccgcctgtttcgggtcctttgctcacggcggcaatgacgtgagtaatgccatcggtcccctggtagccttgtggctgatttacaaacaaggcggggtaacgcaagaagcagctacacccgtctggctgctgttttatggaggagttggaatctgcacaggcctctgggtctgggggagaagagtgatccagaccatggggaaggacctcactcccatcacgccgtccagcggcttcacgatcgagctggcctcagccttcacagtggtgatcgcctccaacatcgggcttccagtcagcaccacgcactgtaaggtgggctcggtggtggccgtgggctggatccgctcccgcaaggctgtggactggcgcctctttcggaacatcttcgtggcctggttcgtgaccgtccctgtggctgggctgttcagcgctgctgtcatggctcttctcatgtatgggatccttccatatgtgtgatttgtcttcttccagctgcaaacagctaaagggatggtctggtgttggcgtgtgggagacatgtgtgctcgtgccacacatacacatcctggccgtgcacggctctctcatgaccagctctctgcctcccttccaggaggctccatcccacactgttcacccaggctgcggagactcaccttcccgagctaacttaactactgtacataataatatgtattaaactggtatcgtggtgatataatgtggtgcagttacttatatattaaatatctattgtatccatagaataggcagcattatttcaaacatattcaagttgggagtggagatcattgcctagaagtcaatattcaataaatcttgtacataactatttcgatggcaaatgttaagccttctaaaaggaaagtgtagattggaaaatgattttttttccaaatgatgtttttgccttctaatatactgtaaggtaatgagcttcagaacaggcaacctgaccctgcagaggtcgcgtgctgtgggatgacagcgggacgggagctcacaagtgctttcactgaagatttgttcatatactgtgtattgattgttgtgtaatatatcatcattgcttttgtaaatacgtaaaactgtaattttttaatggtgtgcttcccttatacttttttgatcagagaattttggaaagtaccaaagaagcaggggaatcattggccagtgttacgttttcacattgtctgtctcccaccctcactgatcacgcctgccccagagcagtgtgtggcggtgacaccgtcacccagcatgcgccacgccgtggctcccaccagcagtgccaccgccaccacaccccagatcccacccaccttgcagtggcctttccttgtcatcagagtagagaatgcacaggtgttggtgagggcgtgtggctgagcactacatgtcaagtccagagtcagtttctatcccaattctccctgcagcctgaagaacggatccttgtctccaatgtcagcacaaaggaggctttttctgtgctttgacattctagcacttcagggatgagagggagggagaatcctggatgctggatggagtatttctctgaggcccacacaaagctggacacccccaggctctactccatcccattggagtctcttctttttttgatagcgggagggaggaagtacgactaatgttggagcctgaaactatggaaatgctgctaaaatttttatattgacaaacattttcttggtacttcattgtcatttttcattaatcaaccatattaaatttataataaaaaatgcccctcagaaaaaaaaaaaaaaagaaaaaaaaaaaaaaa

SEQ ID NO: 2128 - DNA, 1242 bp, Homo sapiens
cgccccgcagcgccggagtcaaagccggttcccggcccagtcccgtcctgcagcagtctgcctcctctttcaacatgacagatgccgctgtgtccttcgccaaggacttcctggcaggtggagtggccgcagccatctccaagacggcggtagcgcccatcgagcgggtcaagctgctgctgcaggtgcagcatgccagcaagcagatcactgcagataagcaatacaaaggcattatagactgcgtggtccgtattcccaaggagcagggagttctgtccttctggcgcggtaacctggccaatgtcatcagatacttccccacccaggctcttaacttcgccttcaaagataaatacaagcagatcttcctgggtggtgtggacaagagaacccagttttggctctactttgcagggaatctggcatcgggtggtgccgcaggggccacatccctgtgttttgtgtaccctcttgattttgcccgtacccgtctagcagctgatgtgggtaaagctggagctgaaagggaattccgaggcctcggtgactgcctggttaagatctacaaatctgatgggattaagggcctgtaccaaggctttaacgtgtctgtgcagggtattatcatctaccgagccgcctacttcggtatctatgacactgcaaagggaatgcttccggatcccaagaacactcacatcgtcatcagctggatgatcgcacagactgtcactgctgttgccgggttgacttcctatccatttgacactgttcgccgccgcatgatgatgcagtcagggcgcaaaggaactgacatcatgtacacaggcacgcttgactgctggcggaagattgctcgtgatgaaggaggcaaagcttttttcaagggtgcatggtccaatgttctcagaggcatgggtggtgcttttgtgcttgtcttgtatgatgaaatcaagaagtacacataagttatttcctaggatttttccccctgtgaacaggcatgttgtattatataacatatcttgagcattcttgacagactcctggctgtcagtttctcagtggcaactatttactggttgaaaatgggaagcaataatattcatctgaccagttttctcttaaagccatttccatgatgatgatgatgggactcaattgtattttttatttcagtcactcctgataaataacaaatttggagaaataaaaatatctaaaataaattttgtctgc

SEQ ID NO: 2129 - DNA, 8082 bp, Homo sapiens
gtgacggcctcggccgcgggcgtttacactggctctgcctccggcatctcttcgccggtgcgtcctcgccgcgcccgtaggtcccggcagccgggccccgcctccttcggagtccgagcgatgggcggggaaagggacaggcaggtatagctctgtcggcgccgcggtgtccacctcagtcaggccacggtggaagacgcgtgccgcggcgcctggttgcctgcagcggcccggacccgagaggaagctgaaccatctatctccagaaatgtcttcagaaagtaaagagcaacataacgtttcacccagagactcagctgaaggaaatgacagttatccatctgggatccatctggaacttcaaagggaatcaagtactgacttcaagcaatttgagaccaatgatcaatgcagaccttatcataggatccttattgagcgtcaagagaaatcagatacaaacttcaaggagtttgttattaaaaagctgcagaagaattgccagtgcagtccagccaaagccaaaaatatgattttaggtttccttcctgttttgcagtggctcccaaaatacgacctaaagaaaaacattttaggggatgtgatgtcaggcttgattgtgggcatattattggtgccccagtccattgcttattccctgctggctggccaagaacctgtctatggtctgtacacatctttttttgccagcatcatttattttctcttgggtacctcccgtcacatctctgtgggcatttttggagtactgtgccttatgattggtgagacagttgaccgagaactacagaaagctggctatgacaatgcccatagtgctccttccttaggaatggtttcaaatgggagcacattattaaatcatacatcagacaggatatgtgacaaaagttgctatgcaattatggttggcagcactgtaacctttatagctggagtttatcaggtagcgatgggcttctttcaagtgggttttgtttctgtctacctctcagatgccttgctgagtggatttgtcactggtgcctccttcactattcttacatctcaggccaagtatcttcttgggctcaaccttcctcggactaatggtgtgggctcactcatcactacctggatacatgtcttcagaaacatccataagaccaatctctgtgatcttatcaccagccttttgtgccttttggttcttttgccaaccaaagaactcaatgaacacttcaaatccaagcttaaggcaccgattcctattgaacttgttgttgttgtagcagccacattagcctctcattttggaaaactacatgaaaattataattctagtattgctggacatattcccactgggtttatgccacccaaagtaccagaatggaacctaattcctagtgtggctgtagatgcaatagctatttccatcattggttttgctatcactgtatcactttctgagatgtttgccaagaaacatggttacacagtcaaagcaaaccaggaaatgtatgccattggcttttgtaatatcatcccttccttcttccactgttttactactagtgcagctcttgcaaagacattggttaaagaatcaacaggctgccatactcagctttctggtgtggtaacagccctggttcttttgttggtcctcctagtaatagctcctttgttctattcccttcaaaaaagtgtccttggtgtgatcacaattgtaaatctacggggagcccttcgtaaatttagggatcttcccaaaatgtggagtattagtagaatggatacagttatctggtttgttactatgctgtcctctgcactgctaagtactgaaataggcctacttgttggggtttgtttttctatattttgtgtcatcctccgcactcagaagccaaagagttcactgcttggcttggtggaagagtctgaggtctttgaatctgtgtctgcttacaagaaccttcagattaagccaggcatcaagattttccgctttgtagcccctctctactacataaacaaagaatgctttaaatctgctttatacaaacaaactgtcaacccaatcttaataaaggtggcttggaagaaggcagcaaagagaaagatcaaagaaaaagtagtgactcttggtggaatccaggatgaaatgtcagtgcaactttcccatgatcccttggagctgcatactatagtgattgactgcagtgcaattcaatttttagatacagcagggatccacacactgaaagaagttcgcagagattatgaagccattggaatccaggttctgctggctcagtgcaatcccactgtgagggattccctaaccaacggagaatattgcaaaaaggaagaagaaaaccttctcttctatagtgtgtatgaagcgatggcttttgcagaagtatctaaaaatcagaaaggagtatgtgttcccaatggtctgagtcttagtagtgattaattgagaaggtagatagaagaatgtctagccaataggttaaaatttcaagtgtccaacatttcccagttccacagtgggaaattttgcacacttgaaattttaaccaagtggctagatattattcctcctttgaagctaatggcatttgtatatacacactgcagcagagcttgtagctggacagagtcaaaaagaagaaaatacggtttcaggctttcttgcagatatgaagtattcttggaatgcaataagtatgtattgaactgtactgtaaagtagctccaaaacttaattactctcctgttttaggggttatacatttggactgtgcattctccaagagatgaagcggtgaagttgggatttacattggaagtgctgtagacttctttatgtggctcagtggagagagggaaagaatgttgcacctgctctagtaccataggtcaagaggcttctggatcacaaagtcataactagacaggtttgttcttgtagttttctatccccagtctttgctccccagatggcagtagtttttagtaggaaagtgccattcctgtccttaaggcacagtctcatcagaagtctaatacctgggcaggtttataacatcctgagagccagcctgacattagacagaataccctttgtaatacattggaaatttttactcatgcctttttgtttaggataaataggtaagcacaaagagctcttcaaaatcagaaaaaacaataggagtccttccttgtcttttctgtgatctctgtccttgtttctgagactttctctaccattaagctctattttagctttcagttattctagtttgtttcccatggaatctgtcctaaactggtgtttttgtcagtgacagtcttgccagtcagcaatttctaacagcattttaaatgagtttgatgtacagtaaatattgatgacaatgacagcttttaactcttcaagtcacctaaagctattatgcaggaggatttagaagtcacattcataaaacccaagtgctatgggtgtattattcatgatagctggcccacaggtcatgaattgaggaggaatttgctttcaaaaagcaagaatgtccaacactgaaagtttatagttttatatttggaccttgaaaggtaagaaaaaaccaggttctccaaagttaggaatagggaactaatttatgaaacagccatcttaaaaaaaaaaaaagtaaactgcaaaagtacaaaatcatttttcaatctgttcccagtttctaaacaattttaaatatttatgagaagcaaaccctatgtgtagggcatctgttggagtgggatgcttttagacatatattaagtatgtacatgtttaatatgtatatttaaaatgcatatatattttattatatctatattatcctatatagatatatgtaacttagctttattgttagctccataagctgccagtgttgcttttctgttggtagagctctcccatttggtgacatggaaaatacctttccattatcacaacaaagcagttgctcagtagaaagtctagatttctgtcttataggtgatttctgtcttataggtgattataatcaagtgtaggcttcctgaattttgacatccttttagaacttgggtctggaattccagaaatgttaattgctgcttgtatttgttcttgtttgttttttagccagtatttgccctttctatccagccttatgaataatagcagtaaaatcacagtatcttggtcagtctttatttttttccttttttcttttttaagagacagtcatccaggccagagtgcagtttgatgatagcttactgaagcttcccactcctgggctcaagttatccttccattttggcctcctgagtagctagaccataggtatgcatcaccacaccctgctaattttttaaatttttttctagagagagggtctcactgtgttgcccaggctggtctcaaactccaggctcaagcaatccttcagcctcagcctcccagagtgttgggattacaggcgtgagccactgcacttggccaagttatttatttttaatctctcttgcccttctcccaaggcaggcttaagttgagactattataggtgtctaataacctgtgacagagtaatgagtacatgcttaagatgttataattagccaacaccaacacagcaaaaaatataattccagccaaagattctggaaaatccctcagaaggagggataacaggatttgacctttaccagcgatttctgtccatatgtggatgtaaacagttctggaacgttatgcatgcagttagcgaatccttgaattatgttctggtttgtacttgtcccatccatccaaacaagagattctgcttttggtagccatctgtagaaacatttaagatgtcactagaatttacatttcatcctctctacttgggttgaggttgcctatacttgcatattgttaaaatgttttggttgctgatattcagaggaatgaaacctggaaccaaagcctaatttgccgataaaaaaactgttttcggccaggtgcagtggctcatgcctgtaatcccagcacgttgggaggccgaggcgggtggatcacctgaagtcaggagttcgagaccatcctggctaacactgtgaaaccccgtctctactaaaaatacaaaaaattagcggggcatggtggcacgcgcctgtagtcccagctactcaggaggctgaggcaggagaattacttgaacccgggaggcggaggttgcagtaagcagagattgtgccactggactccagcctgggtgacagagcgagactccgtctcaaacaaacaaacaaaaaactgttttcatttgctctcttgaccaaaggataggactttagttctttaagcattattttaaacactatattgatacaaaaatatcttgcttactctaaactttagagtctaaatgaagctttttctcagtacaagattctgagtatcataaaatggttatttaattgaaacgtagtgtggtatactcttgatggttagaactcttacagccttatttatttttaagtttgttacagccaaagggttggagtgtgccagtgcacaggtagactaaggaaaacattatagaggagtgaagagaacagaccattgaaaagactattatctgaccagcggaggcagaaaagagaggaacccagttgaataggatccaatccctggttagcctctacacaataatagggagacaaggattaggagccatacctcccagagcaaggtatctttctagagcaaatttctctttctagaaggggagggtcacagggtcacagattcaccaaagctgaaagggctgaggagctcatggtagcctgggctgacctactctggagcacggtgtcttccttctaaactgagtgactgtagtactatctgtgcctctgatggtaataaaactgacaagatgtctaatttttttttaagtaggaccaaaggaaaacaagatttagatagtctgactttgcttttgaacaacagacattgcaagtcaaaattgttgtcaaatttacatatggtaaatgatgaactttaaaaatgtgtccaggtgttagatgagttcattagactcttttaatgctaatggctagtacgtttaaacaaaacagcagttctctgctgcaatattcccattgaccacttaaatgaccataagtggtcatttaagaacatgttagggttagccctgatctgaatataaaagtgagaaaagggctacagtgcatttcttggtaacttaaactgagtcttgaagttataatgatccattcgagttctgtgatccttattgttcttaattgtgtttctctacgtattgttacagatgagccatacgtttctttgtatcaatgtagacatgacttcagatacctctgaggacctacccagcagtctaggaccctgggccaagtgctgggactatggtactaaatccagtagatgggctgtgtagcaactctcccagggaacacactagggtacttagggaggtgctttgtggagcatgttgaagctttgagatctgagcaggaggcagtgatgtccctggtctattcagggaaagatttcagtgtgaaatggtaaacatccaattgacaggatttagattttgcttagtttttctgctttttaatgtttctatcccccatctcagtgttttctttatccatcccagtgatgccttatttgaaactgggcttaaactgcaaaaagaatgaagttggatttaggaagctgttagatcattgagtggtgttgagagtgaagtttcactagcagggaagtttccttgagcctaaaataaaaagaaaaaattaaaaagaatcagtttttttaattaaaaaaatagaaagctgttaggctcctaattcgtggggtttttttttgtaaaaacagtttagataatcctgaatgcaatcattaacttggttgctaattacaagaatgaaaattataatggaaaaggacaaaataatataccagctggtttgttattatagtccgtgtattaaaatactattgaaatacgttaaaggtaaatttttaaggtttaaaaaaaatttagtaacttacagggatggagaatttagatgtcagaggtggggagatttatttttataaggtaatttttatcctgataaggacttaaaaaaaagttttgcaactgaaattttaaagtaaacatgttaagtacagttaaaaagtaagcattgtagtaaatagtggattctctggtgtgtattttttatctcagtgttgaaaattggaaaagaatggactgaagtctaaaaactggaataatgaaggacactaaatgcctttattgtagatactatgtttgtaagtctatagctaagcaacttaagccaaaaaggtctttcaactgaagctttaatcaacttattttggagatgttctcttcccttatctcatgcgtcatccctaaaataataagatacatgggatcaaatagcccttgccttttcaacacaaatcagttggaaaattatggtttgagtcctgttgctgccatggcttctgtttctcagaaatgagtgtgtatgaacataccaatctatgtaataggctacctttttttgtcttctttggaactttgtacacaaaccaagacaatatcagggtgacaggtgaatgaacttaaattctcagtcttgtctattcaccaaaaaagtatactgcctgttttttctttaattattcaaggttgatgacttttaggaacatgttttatactgtattttttaattaaagcaagtgccttgatgtaattccatgtaaatcattgcttaaccctcttatgggatgaggatgagttattaatgtattgcagcctactggaaaggagggggagttggttaatagcagatacttttcttctagaagcttatgttttatgctgtttattatgtaagatcctgtatgtgtgttgagatttagaggtttcatttgttttgtctgctaataaattgttactctaataataaaaaaaa

SEQ ID NO: 2130 - DNA, 3562 bp, Homo sapiens
ggggcggggctggagcggcccgcggcctcagctctctctgcttccccaggatgcgggctccgggtgcgggcgcggcctcggtggtctcgctggcgctgttgtggctgctggggctgccgtggacctggagcgcggcagcggcgctcggcgtgtacgtgggcagcggcggctggcgcttcctgcgcatcgtctgcaagaccgcgaggcgagacctcttcggtctctctgtgctgatccgcgtgcgcctggagctgcggcggcaccagcgtgccggccacaccatcccgcgcatctttcaggcggtagtgcagcgacagcccgagcgcctggcgctggtggatgccgggaccggcgagtgctggacctttgcgcagctggacgcctactccaatgcggtagccaacctcttccgccagctgggcttcgcgccgggcgacgtggtggccatcttcctggagggccggccggagttcgtggggctgtggctgggcctggccaaggcgggcatggaggccgcgctgctcaacgtgaacctgcggcgcgagcccctggccttctgcctgggcacctcgggcgctaaggccctgatctttggaggagaaatggtggcggcggtggccgaagtgagcgggcatctggggaaaagtttgatcaagttctgctctggagacttggggcccgagggcatcttgccggacacccacctcctggacccgctgctgaaggaggcctctactgcccccttggcacagatccccagcaagggcatggacgatcgtcttttctacatctacacgtcggggaccaccgggctgcccaaggctgccattgtcgtgcacagcaggtactaccgcatggcagccttcggccaccacgcctaccgcatgcaggcggctgacgtgctctatgactgcctgcccctgtaccactcggcaggaaacatcatcggcgtggggcagtgtctcatctatgggctgacagtcgtcctccgcaagaaattctcggccagccgcttctgggacgactgcatcaagtacaactgcacggtggttcagtacatcggggagatctgccgctacctgctgaagcagccggtgcgcgaggcggagaggcgacaccgcgtgcgcctggcggtggggaacgggctgcgtcctgccatctgggaggagttcacggagcgcttcggcgtacgccaaatcggggagttctacggcgccaccgagtgcaactgcagcattgccaacatggacggcaaggtcggctcctgtggtttcaacagccgcatcctgccccacgtgtaccccatccggctggtgaaggtcaatgaggacacaatggagctgctgcgggatgcccagggcctctgcatcccctgccaggccggggagcctggcctccttgtgggtcagatcaaccaacaggacccgctgcgccgcttcgatggctatgtcagcgagagcgccaccagcaagaagatcgcccacagcgtcttcagcaagggcgacagcgcctacctctcaggtgacgtgctagtgatggatgagctgggctacatgtacttccgggaccgtagcggggacaccttccgctggcgaggggagaacgtctccaccaccgaggtggagggcgtgctgagccgcctgctgggccagacagacgtggccgtctatggggtggctgttccaggagtggagggtaaggcagggatggcggccgtcgcagacccccacagcctgctggaccccaacgcgatataccaggagctgcagaaggtgctggcaccctatgcccggcccatcttcctgcgcctcctgccccaggtggacaccacaggcaccttcaagatccagaagacgaggctgcagcgagagggctttgacccacgccagacctcagaccggctcttcttcctggacctgaagcagggccactacctgcccttaaatgaggcagtctacactcgcatctgctcgggcgccttcgccctctgaagctgttcctctactggccacaaactctgggcctggtgggagaggccagcttgagccagacagcgctgcccaggggtggccgcctagtacacacccacctggccgagctgtacctggcacggcccatcctggactgagaaactggaacctcagaggaacccgtgcctctctgctgccttggtgcccctgtgtctgcctcctctccctgcttttcagcctctgtctccttccatccctgtccctgtctggccttaactcttccctctttttcttttctttctttctttcttttttttttaagatagagtctcactctgctgcccgggctagagtgcagtggtgggatctcggctcactgcaacctctgcctcctggggttcaagtgatcctcccacctcagcctcctgagtagctgggattacaggcacccgccaccacgtccagctaatttttatatttttagtagagacggggtttcaccatgttggtcaggctggtcttgaactcctgacctcaggtgatccgctggcctcggcctcccagagtgctgggattataggcgtgagcctctggcccggcctttcctttttcctctcctctcctgccgagagtggaacacacgtgtcctgggagctgcatcttgtgtagggtccagctgcttttggggactgcaggaatcatctcccctgggccctggactcggactggggcctccccacctccctctcggctgtgccttacggagccccaatccaggcctcctgtggctgttgggttccagatgctgcagctccatgtgacttccaagcaggccctccgccctccctgctgaatggaggagccgggggtcccccaggccaactggaaaatctcccaggctaggccaattgccttttgcacttccccgttcctgtcacatttccccagccccaccttcccctcctgatgccctgaaagcttccggaattgactgtgaccacttggatgtcaccactgtcagcccctgccttgatgtccccatttagccatctccatggagctcctgctggagggccctgaaccctgcactgcgtggctgcccagccagctgcctcctgtcctgggaggaggcctcctgggtgtcctcatctggtgtgtctactggagggtcccacaggagaggcagcagaggggtcaggggaggtctcctgccgggggttggcctctcaagcctcaggggttctagcctgttgaatataccccacctggtggtggcccctccgatgtccccactgatggctctgacaccgtgttggtggcgatgtcccagacaatcccaccaggacggcccagacatccctactggcttcgctggtggctcatctcgaacatccacgccagcctttctggggccggccacccaggccgcctgtccgtctgtcctccctccagcagcaccccctggcccctggagtggtggggccatggcaagagacaccgtggcgtctcatgtgaactttcctgggcactgtggttttatttcctaattgatttaagaaataaacctgaagaccgtcaaaaaaaaaaaaaaa

SEQ ID NO: 2131 - DNA, 3915 bp, Homo sapiens
gtggggtggggtggggctgggggcttgtcgccctttcaggctccaccctttgcggagattataaatagtcatgatcccagcgagacccagagatgcctgtaatggtgagactttggatccttcctgaggacgtggagaaaactttctgctgagaaggacattttgaaggttttgttggctgaaaaagctgtttctggaatcacccctagatctttcttgaagacttgaattagattacagcgatggggacacagaaggtcaccccagctctgatatttgccatcacagttgctacaatcggctctttccaatttggctacaacactggggtcatcaatgctcctgagaagatcataaaggaatttatcaataaaactttgacggacaagggaaatgccccaccctctgaggtgctgctcacgtctctctggtccttgtctgtggccatattttccgtcgggggtatgatcggctccttttccgtcggactcttcgtcaaccgctttggcaggcgcaattcaatgctgattgtcaacctgttggctgtcactggtggctgctttatgggactgtgtaaagtagctaagtcggttgaaatgctgatcctgggtcgcttggttattggcctcttctgcggactctgcacaggttttgtgcccatgtacattggagagatctcgcctactgccctgcggggtgcctttggcactctcaaccagctgggcatcgttgttggaattctggtggcccagatctttggtctggaattcatccttgggtctgaagagctatggccgctgctactgggttttaccatccttcctgctatcctacaaagtgcagcccttccattttgccctgaaagtcccagatttttgctcattaacagaaaagaagaggagaatgctaagcagatcctccagcggttgtggggcacccaggatgtatcccaagacatccaggagatgaaagatgagagtgcaaggatgtcacaagaaaagcaagtcaccgtgctagagctctttagagtgtccagctaccgacagcccatcatcatttccattgtgctccagctctctcagcagctctctgggatcaatgctgtgttctattactcaacaggaatcttcaaggatgcaggtgttcaagagcccatctatgccaccatcggcgcgggtgtggttaatactatcttcactgtagtttctctatttctggtggaaagggcaggaagaaggactctgcatatgataggccttggagggatggctttttgttccacgctcatgactgtttctttgttattaaaggataactataatgggatgagctttgtctgtattggggctatcttggtctttgtagccttctttgaaattggaccaggccccattccctggtttattgtggccgaactcttcagccagggcccccgcccagctgcgatggcagtggccggctgctccaactggacctccaacttcctagtcggattgctcttcccctccgctgctcactatttaggagcctacgtttttattatcttcaccggcttcctcattaccttcttggcttttaccttcttcaaagtccctgagacccgtggcaggacttttgaggatatcacacgggcctttgaagggcaggcacacggtgcagatagatctggaaaggacggcgtcatggagatgaacagcatcgagcctgctaaggagaccaccaccaatgtctaagtcgtgcctccttccacctccctcccggcatgggaaagccacctctccctcaacaagggagagacctcatcaggatgaacccaggacgcttctgaatgctgctacttaattcctttctcatcccacgcactccatgagcaccccaaggctgcggtttgttggatcttcaatggctttttaaattttatttcctggacatcctcttctgcttaggagagaccgagtgaacctaccttcatttcaggagggattggccgcttggcacatgacaactttgccagcttttcctcccttgggttctgatattgccgcactaggggatataggagaggaaaagtaaggtgcagttcccccaacctcagacttaccaggaagcagatacatatgagtgtggaagccggagggtgtttatgtaagagcaccttcctcacttccatacagctctacgtggcaaattaacttgagttttatttattttatcctctggtttaattacataatttttttttttttactttaagtttcaggatacatgtgccgaatgtgcaggtttgttacataggtatatatatgccatgatggaaatatttatttttttaagcgtaattttgccaaataataaaaacagaaggaaattgagattagagggaggtgtttaaagagaggttatagagtagaagatttgatgctggagaggttaaggtgcaataagaatttagggagaaatgttgttcattattggagggtaaatgatgtggtgcctgaggtctgtacgttacctcttaacaatttctgtccttcagatggaaactctttaacttctcgtaaaagtcatatacctatataataaagctactgatttccttggagcttttttctttaagataatagtttacatgtagtagtacttgaaatctaggattattaactaatatgggcattgtagttaatgatggttgatgggttctaattttggatggagtccagggaagagaaagtgatttctagaaagcctgttcccctcactggatgaaataactccttcttgtagtagtctcattacttttgaagtaatcccgccacctatctcgtgggagagccatccaaataagaaacctaaaataattggttcttggtagagattcattatttttccactttgttctttaggagattttaggtgttgattttctgttgtattttaactcatacctttaaaggaattccccaaagaatgtttatagcaaacttggaatttgtaacctcagctctgggagaggatttttttctgagcgattattatctaaagtgtgttgttgctttaggctcacggcacgcttgcgtatgtctgttaccatgtcactgtggtcctatgccgaatgccctcaggggacttgaatctttccaataaaccaggtttagacagtatgagtcaatgtgcagtgtagcccacacttgagaggatgaatgtatgtgcactgtcactttgctctgggtggaagtacgttattgttgacttattttctctgtgtttgttcctacagcccctttttcatatgttgctcagtctccctttcccttcttggtgcttacacatctcagaccctttagccaaacccttgtcagtgacagtattttggttcttagttctcactgttccctctgctcctggagcctttgaataaaaatgcacgtagctgaggccggatgcggtggctcacgcctgtaatcccagcactttgggaggcctaggcgggcggtcaggggttcgagaccagtctggccaacatcgtgaaaccctgtctctactaaaaatgcaaaaattagccgggcgtggtggcgggcgcctgtaatcccagctacttgggaagctgaggcgggagaatcatgtgaacccgggacgcaggggttgcagtgagcggagatcgcatcattgcactctagcctgggccacagggcgagactccgtctcaaaaaaaaaaaaatgcacatagctatcgagtgtgctttagcttgaaaaggtgaccttgcaacttcatgtcaactttctggctcctcaaacagtaggttggcagtaaggcagggtcccatttctcactgagaagattgtgaatatttccatatggattttctattgttactctggttctttgttttaaaataaaaattctgaatgtacacg

SEQ ID NO: 2132 - DNA, 2952 bp, Homo sapiens
aactgatcgcggcctagtcccgacgcgtgtgtgctagtgagccggagccggcgacggcggcagtggcggcccggcctgcaggagcccgacggggtctctgccatgggggagtgacgcgcctgcacccgctgttccgcggcagcggcgagacatgaggagaccccgcgacaggggcagcggcggcggctcgtgagccccgggatggaggagaaatacggcggggacgtgctggccggccccggcggcggcggcggccttgggccggtggacgtacccagcgctcgattaacaaaatatattgtgttactatgtttcactaaatttttgaaggctgtgggacttttcgaatcatatgatctcctaaaagctgttcacattgttcagttcatttttatattaaaacttgggactgcattttttatggttttgtttcaaaagccattttcttctgggaaaactattaccaaacaccagtggatcaaaatatttaaacatgcagttgctgggtgtattatttcactcttgtggttttttggcctcactctttgtggaccactaaggactttgctgctatttgagcacagtgatattgttgtcatttcactactcagtgttttgttcaccagttctggaggaggaccagcaaagacaaggggagctgcttttttcattattgctgtgatctgtttattgctttttgacaatgatgatctcatggctaaaatggctgaacaccctgaaggacatcatgacagtgctctaactcatatgctttacacagccattgccttcttaggtgtggcagatcacaagggtggagtattattgctagtactggctttgtgttgtaaagttggttttcatacagcttccagaaagctctctgtcgacgttggtggagctaaacgtcttcaagctttatctcatcttgtttctgtgcttctcttgtgcccatgggtcattgttctttctgtgacaactgagagtaaagtggagtcttggttttctctcattatgccttttgcaacggttatcttttttgtcatgatcctggatttctacgtggattccatttgttcagtcaaaatggaagtttccaaatgtgctcgttatggatcctttcccatttttattagtgctctcctttttggaaatttttggacacatccaataacagaccagcttcgggctatgaacaaagcagcacaccaggagagcactgaacacgtcctgtctggaggagtggtagtgagtgctatattcttcattttgtctgccaatatcttatcatctccctctaagagaggacaaaaaggtacccttattggatattctcctgaaggaacacctctttataacttcatgggtgatgcttttcagcatagctctcaatcgatccctaggtttattaaggaatcactaaaacaaattcttgaggagagtgactctaggcagatcttttacttcttgtgcttgaatctgctttttacctttgtggaattattctatggcgtgctgaccaatagtctgggcctgatctcggatggattccacatgctttttgactgctctgctttagtcatgggactttttgctgccctgatgagtaggtggaaagccactcggattttctcctatgggtacggccgaatagaaattctgtctggatttattaatggactttttctaatagtaatagcgttttttgtgtttatggagtcagtggctagattgattgatcctccagaattagacactcacatgttaacaccagtctcagttggagggctgatagtaaaccttattggtatctgtgcctttagccatgcccatagccatgcccatggagcttctcaaggaagctgtcactcatctgatcacagccattcacaccatatgcatggacacagtgaccatgggcatggtcacagccacggatctgcgggtggaggcatgaatgctaacatgaggggtgtatttctacatgttttggcagatactcttggcagcattggtgtgatcgtatccacagttcttatagagcagtttggatggttcatcgctgacccactctgttctctttttattgctatattaatatttctcagtgttgttccactgattaaagatgcctgccaggttctactcctgagattgccaccagaatatgaaaaagaactacatattgctttagaaaagatacagaaaattgaaggattaatatcataccgagaccctcatttttggcgtcattctgctagtattgtggcaggaacaattcatatacaggtgacatctgatgtgctagaacaaagaatagtacagcaggttacaggaatacttaaagatgctggagtaaacaatttaacaattcaagtggaaaaggaggcatactttcaacatatgtctggcctaagtactggatttcatgatgttctggctatgacaaaacaaatggaatccatgaaatactgcaaagatggtacttacatcatgtgagataactcaagaattacccctggagaataaacaatgaagattaaatgactcagtatttgtaatattgccagaaggataaaaattacacattaactgtacagaaacagagttccctactactggatcaaggaatctttcttgaaggaaatttaaatacagaatgaaacattaatggtaaaagtggagtaattatttaaattatgtgtataaaaggaatcaaattttgagtaaacatgatgtattacatcatcttcgaaaatagatatgatggattctagtgaagaccaaaattacttctgtttactttctatcaggaagcatctccattgtaaatatgtatttacatgtttattacaaagacccaaatgaaaaatttttagtccattttttgcatagcctaaagataaaataggaataaaagttctatatttatggaaaaaaaaaaaaaaaaaa

SEQ ID NO: 2133 - DNA, 8487 bp, Homo sapiens
ccttcggccccggcggggctctggcgtacccaaaatgcaggccccagcggaacgcacagccctcctgtcctccgccggtgcccctttagccgccccacccccatccctaagggctctcattctccagctgcagccgcagctgggttccgaacacgccgccgggccccgggagggagaggggcaggtgccagggcggcgcgcagcctctgctcccggtgccagcttcagtgcgccgggcacacgcgcgccccgcaacccctccctcaccctttccccgttgctcaatctccgccagccgcggtcgctgcatcgtcagagagctgcaagagggaggcagcaaggtgcggccgccagcagtgacaccatgtgaccggcacggctcactgacacgcagctttggttaaagagcgggcgcacaggaggggaggagaccgcgcgcgggacggggaggaatggcctgtccgcgttaaaccatcacaagccatggttgcggaagggccacgcgtcccccagtaggagaatgactccgattcgtgaccctcagcgccggtgcatgtcgatgtaagtgcgaggccggcgagcagagtgtgagtgggggttggtggtgaggggagattctgatgcaatcggcccggaaaggaggagagccaggcgagcgcggactggggcggccacgccactccgccagaaggtcgccaggagcctccgcccttcaccttcctccgaaatccgccaggccacgccaagctccctgcccaacccttactgacgggggccacattttcccggcctccgcagccagaccttgacacaaaggacatcaaactgccgagggtaaaaaccccggaagggcggacacctccacatcgccttttgccacctttccctttatttccggagatatttattgagtgtctactgtgtgccaggcactatatctatgtgcatagaaaaaccctggaaggccatacaacaatatatatagagtgatcgtctctgcttgctgagctaacaggggtgtcaagcttccattttggtatctacttctaaatacactcagaacaggagaaatttggactaattttcaaactacagacactttctaatcatgatgcatttcaaaagtggactcgaattaactgagttgcaaaacatgacagtgcccgaggatgataacattagcaatgactccaatgatttcaccgaagtagaaaatggtcagataaatagcaagtttatttctgatcgtgaaagtagaagaagtctcacaaacagccatttggaaaaaaagaagtgtgatgagtatattccaggtacaacctccttaggcatgtctgtttttaacctaagcaacgccattatgggcagtgggattttgggactcgcctttgccctggcaaacactggaatcctactttttctggtacttttgacttcagtgacattgctgtctatatattcaataaacctcctattgatctgttcaaaagaaacaggctgcatggtgtatgaaaagctgggggaacaagtctttggcaccacagggaagttcgtaatctttggagccacctctctacagaacactggagcaatgctgagctacctcttcatcgtaaaaaatgaactaccctctgccataaagtttctaatgggaaaggaagagacattttcagcctggtacgtggatggccgcgttctggtggtgatagttacctttggcataattctccctctgtgtctcttgaagaacttagggtatcttggctatactagtggattttccttgagctgtatggtttttttcctaattgtggttatttacaagaaatttcaaattccctgcattgttccagagctaaattcaacaataagtgctaattcaacaaatgctgacacgtgtacgccaaaatatgttaccttcaattcaaagaccgtgtatgctttacccaccattgcatttgcatttgtttgccacccgtcagtcctgccaatttacagtgagcttaaagaccgatcacagaaaaaaatgcagatggtttcaaacatctcctttttcgccatgtttgttatgtacttcttgactgccatttttggctacttgacattctatgacaacgtgcagtccgacctccttcacaaatatcagagtaaagatgacattctcatcctgacagtgcggctggctgtcattgttgctgtgatcctcacagtgccggtgttatttttcacggttcgttcatctttatttgaactggctaagaaaacaaagtttaatttatgtcgtcataccgtggttacctgcatactcttggttgttatcaacttgttggtgatcttcataccctccatgaaggatatttttggagtcgtaggagttacatctgctaacatgcttattttcattcttccttcatctctttatttaaaaatcacagaccaggatggagataaaggaactcaaagaatttgggctgcccttttcttgggcctgggggtgttgttctccttggtcagcattcccttggtcatctatgactgggcctgctcatcgagtagtgacgaaggccactgaaacccgccgagaaaaagaaacatccctgttgtctgctcagtcaagtccccacacatcagcaatctctcaccacttcttttgcaagtttacagaagcaaacagaaatgtacaggatacttaaaatggaataactttttggttgcaaaacagagacatggttctataatgcttcatgtccctccaagatttgagatcaatttagggattgtgaaatttttttttcaaatttcatacaatcatatttcccagtacttttcacaatcattttttacccatctaactctatgttttgtggcttcccggtctcttagaactttgaaaacatgatatacaataatgtttatttattatacatccagattctgaaataattttcctactgatgttcagctcacactatctgtacctttttagaagagaaaagaatcttgaattgtatatatttattttgctttacagaaaaaaatggtttcgtaaataatttgcctattttggttaacatagcacatggagataatcatctgaaagttatagggcactgccactgctgaatcagagcatgcccaatatttgaggtggctctgatttcctggcagctgaactcgggtagtccagtggcctagctggtaccacatctattcccatccagagacattctctggcaagtgttctcagctgaaaagtggttggggatgattcttaccttggtaattaaatgaagctacacatttgggtaatctagcaaatgaagtattttttccctcttggcaacttgtgtcagagttactctggtctgagtcaactttcgctggggaaaacctatggaacctactgcaaaaagattgtccaaaatgcctaagaaaatactcctctgatgcatttagccttcaaccctacctgtcttgctgaagggagaaaaatgttttagtacattataggcccagcagcttttattcatgtccaccagctagttgcacagagaatcatgtgtacctaactaaggatgatctaggataagtaactcctgttttatattgagtattttagggaagtctttaaaagacttgttttatatctataaatctaggttattacaaatacaagaattttgtaccttaaataagcctcatttctatttcttcttcattaattctccatctagtcttgtgaaaaaaaaaaaaaaaaaaccctcagagatagtctttgtgaagagcttctgacagaatcactgagtaccttccttcccccagatgaggaagacaagggggtctcagtgtctgtgctgtctcctcttctcttccccaaccaaggactgtgccattactgcccgtctcaactgtccatgcaggaggacagagttgcctggtactcttacccttgtccctctcctaaagggagcacaaggaaactgaagagactgaaaaagaagagagtttgtagctgaaaaagaatagggatagcaaggaaacccagaactgcattcccctaagtggggccatcccatgtgattgaattgtccatagcttgcctatggtgagaaatgtgcatgctccgtgagctggtctcttgaaacaggacttatgcttcctctatattctggttaaattttccaaacacataagttcactgagcacagatttcttatccagagacaagtagaatctaaccgcagactgttggcagagtttccaggcacttagccatgttcccttcctgactcaaatccccaaaggccttcactctcactgagaatcacactactgtcccatagataaggcaggcattgaagcacctgtcgtgatcctctaggggggagaatgaaaggttatttcctgcattgcatcatcatagcttttaatataatgctacagaatcatatccacattaggttagagttcagatatttggatatgaatacctaacctagccatatccatggccatctctgttcttttcagcaatgttttccatattatattagcaatgacagaaacagaacaagccaagatccagtcagttcttgggagcttgtctagagcaccaagtaatgaaatagccaggtagtgggatgactgtacctttaaaaatacataatttagtttgcaagctatattatgctactttctattttccttgttactttatagcaattcattttaccctcacaaagtcaatttagaaccttatcattaactgggatgtgtagtgatatttttgggcctctgggtttcatgtgtcaatacaaggaatatttatttaaaatagatttatttagaggaggcacagtgttgttgatctgtgtgacaccacccatatttttaaaaacctttgtatgtttctctaaatttgttgttgactgaatataatagaccctaccataattcgtcaaatatcactgattagttacatcctttgtgtgagattagctgtaaagtatactgctcttattcttattcagaatagttaattggtagccaaaaatacatgtatcacagatgttaggtcgaatttaaacagcacagtcaagtgctatggaagtttttctgctaaattagtagattaaagaatactataccctaggcatggggagcagcacgttttcctttggtaggtaggatctctatactagtgaacagtgccagttccacactttggacttagaactgttctctagttattgtaacacagaatactgtcaatccctaatttacttaatgttacttattggaagtggggctgatgaaatacgcacaggagggaaatctactgtgtttaggcacaggcagccccagtgtataaggagatcatattccaaaaggttgtcagttggttgtttgcaacctggaatgtattttcctttagagaccaggttatccatggtggttaggcccctagagcagctggaaaagatgatcaaaccaataggttagctgacatcgaataatgtaataggtttgctaaagaatctaaccatcaaatataatattgtttccagggagggtgtttgttcagagttgcctgttagtagaatctggactgtccatcccagccacatcccacctactggacagtaggggtagagatgccaccagactacaggtgaccagattggcctgaaacatggtgtccagtaaaaacggggaggaataagtccatgactgctggagagcttggtggtaggaggagggtgaaggagggtgagggggcctctcatgggtcagaaacctccagggacatccctcagctggtaactctgctgttgtccggagggttcaggcttggtgtgccttcttctgtttgtctgacttttggctcctatggttcatctcctgccctgcccaccacagaaaaggatgctgctgcatagcttctccaatgtaccagtcattgaggccagcgcgcagcacttttaatgtttttagtgctagtaactgtgttttaactctccaggaataagctgggaggttagaaaacaagaaaaaagggggaaaaaaaaacctctccacccactttccttttttacagttacagaccctgttgagaaaaagaagcacccagatgggtgatggtgatagggcttgtggtggacacagggttgtggtaagattcctcagtgcttcggcgagcacctaagactattaccctggaactgactgctttctagagcttgattcatgcctctaagccagtggttctcaaagtgtggcccctagaccagtagcatcagcatcatcggggacctcattagaatgcagattctcagccccctcccagacatggtgaagtcagaagctctcagggagggactcagcaaatgattctaaagcgcatcaagtttgagaaccaccctaagccaatgagtctcccttttacttcccattagtcctccctcaccagatgattcctaggactcatggtgcaacatacaggagccaggctttagggaggggaggaaaggagcctggcggcaggggtctctgcaatggcaagaaagtgagtgaatccagcgctgccacctggttatccccttctcgttgaaaatagcagcgcaggtgcaaattcctaaacacaggctgcctgcactcggtgttacctcgggctgaggcatgataatattttattttttaaagctgtgaggaaatgaaagtgaggctttggttggggcgaggcagttgtgaaagaaattaaaataaaagaccctttgtaaatgcagacttagaagaaatactgaatttgtgtcagaagttctccagtgtttgtgttaatcgtgtggtgataatcctgtcctccttttaaagcgaattctctactgaaaggtctgctctgcttaaggagctacaaactgctctcaaaagaatgaaatactgagttccaattcagtgaggcacagtgttggactatggcacatttagttggagtcggggggaggtcaggaatatgatcagataatggattttataccttagagcaaaatctattagtctctctcagtttatcaatttaaatggctttaggcttatagggggtgtaaactttaagaatataattctcccattcaagtttacagcaaacatctagccaccttcaaaacaaagaatatacagaccatcatttagcaatactaatacatgattttccttggggatggcaggtttgagaatcctttagcaacaggacatacttcccctaaattacagtgaattatttataacgagataaagctttcaggtacaagctgaaggtggggtgtctaacaactaaaaactatcactaaatctcaaagagaaagttcttgcaaaatatgtaaagttcacaaggtgcagacattttccttctttaggcttttatctaaggaagggctatgaaactgggcccatctgtatacaggctcaaatttacgtttttaaaggaagaatctatgcagctgaggcttattgcaggaaatacttcatttgtatgtaaatattattgtaaataaataggaggctgtatatttttgaagttgttgatctgcactgaaatagaagtctctaggatctgcatataaacaataaatgtttcctagaaattagtggttttgtttgggaattagaaaaatttacattctctcccaggtaacatagttctctcaatgtaaacttggaacctgaaaccctacttaatttagagaaagaaatgtctgagaaatagttcccttgatttcttatgctggcattaagatcaattatttaacagatagtcctctgagatacaagtaaggaatatttagacacaaatccttgtcctatagaaacagatatacccaaatgacaaattgtttcttcataatgatcttccatttttaacactgataccactacacagtacatatgaaaacagaagctggggagaagaatgtttttttcacaattgaattgctgcatttctcaaactttgggatctatgaaagcggggagagggaacctgaatattaattatgagcacaaatttgaaggaaagaaaacaaagaaccattatctaatcaagctttgaaagtcctgcatgtttgccttttattttagtgttgacgccaacatagactgtctaaggtatttttttccccaaacacttgaatcttggtcgttggtatgtaatccactctctagagtccagtgtactttagacttcatctgagtccaatacatgtaccacactactgttttattaatgtaaaaaccttgtaaatgaatttcagatgggtgatttaagtgagtcacaagtcacaaaactttgctattcatagttaatcaaatagaactgggttttttttttcagagtgtggtgtaaataaagaaatataagaagttctgttctataactgctctgttaacatagtttttaaacattaaaaaatgtgaactaaaagtatttaaaaa

SEQ ID NO: 2134 - DNA, 2445 bp, Homo sapiens
aggagagtcaggccaatggggccgcagttctttcttttttttttctttattcttatttttggagacagggtctcgctctgttgcccaggctggagtgcggtggtgcgatcacggttccatgcagcccccgacctcccgggctcaggtgattctcccgcctcagcaccgcgagcagctaggaccacaggcgcgagccactgcgtccggccggcgggacttatttgtcaggcggggattgggttccgccagcctaaagggaggggtaagcgccagaatatgaatcgccgggaagctgggagaaagctccgggaaaccctgagcagccaggtcgcctgctccgcccgctcccgctcccgatctctgattgctcctaactgacgtcactcccggtctgtccccgcccactcggtgctgccattggcagtcggtcgtgggtctgagagtcactggagctaccagaagcatcatggggccctggggagagccagagctcctggtgtggcgccccgaggcggtagcttcagagcctccagtgcctgtggggctggaggtgaagttgggggccctggtgctgctgctggtgctcaccctcctctgcagcctggtgcccatctgtgtgctgcgccggccaggagctaaccatgaaggctcagcttcccgccagaaagccctgagcctagtaagctgtttcgcggggggcgtctttttggccacttgtctcctggacctgctgcctgactacctggctgccatagatgaggccctggcagccttgcacgtgacgctccagttcccactgcaagagttcatcctggccatgggcttcttcctggtcctggtgatggagcagatcacactggcttacaaggagcagtcagggccgtcacctctggaggaaacaagggctctgctgggaacagtgaatggtgggccgcagcattggcatgatgggccaggggtcccacaggcgagtggagccccagcaaccccctcagccttgcgtgcctgtgtactggtgttctccctggccctccactccgtgttcgaggggctggcggtagggctgcagcgagaccgggctcgggccatggagctgtgcctggctttgctgctccacaagggcatcctggctgtcagcctgtccctgcggctgttgcagagccaccttagggcacaggtggtggctggctgtgggatcctcttctcatgcatgacacctctaggcatcgggctgggtgcagctctggcagagtcggcaggacctctgcaccagctggcccagtctgtgctagagggcatggcagctggcacctttctctatatcacctttctggaaatcctgccccaggagctggccagttctgagcaaaggatcctcaaggtcattctgctcctagcaggctttgccctgctcactggcctgctcttcatccaaatctagggggcttcaagagaggggcaggggagattgatgatcaggtgcccctgttctcccttccctcccccagttgtggggaataggaaggaaaggggaagggaaatactgaggaccaaaaagttctctgggagctaaagatagagcctttggggctatctgactaatgagagggaagtgggcagacaagaggctggccccagtcccaaggaacaagagatggtcaagtcgctagagacatatcaggggacattaggattggggaagacacttgactgctagaatcagaggttggacactatacataaggacaggctcacatgggaggctggaggtgggtacccagctgctgtggaacgggtatggacaggtcataaacctagagtcagtgtcctgttggtcctagcccatttcagcaccctgccacttggagtggacccctcctactcttcttagcgcctaccctcatacctatctccctcctcccatctcctaggggactggcgccaaatggtctctccctgccaattttggtatcttctctggcctctccagtcctgcttactcctctatttttaaagtgccaaacaaatccccttcctctttctcaaagcacagtaatgtggcactgagccctacccagcacctcagtgaagggggcctgcttgctctttattttggtcccggatcctggggtggggcagaaatattttctgggctggggtaggaggaaggttgttgcagccatctactgctgctgtaccctaggaatatggggacatggacatggtgtcccatgcccagatgataaacactgagctgccaaaacatttttttaaatacacccgaggagcccaagggggaagggcaatgcctacccccagcgttatttttggggagggagggctgtgcatagggacatattctttagaatctattttattaactgacctgttttgggacctgttacccaaataaaagatgtttctagaaaaaaaaaaaaaaaaaaa

SEQ ID NO: 2135 - DNA, 2800 bp, Homo sapiens
gaagtgactgcgggagtggagccggcgagagagtggcagcgggggctgatggaagtgcagtgggggctggagagggcaccctactgtatccagcatgctccaaggccacagctctgtgttccaggccttgctggggaccttcttcacctgggggatgacagcagctggggcagctctcgtgttcgtattctctagtggacagaggcggatcttagatggaagtcttggctttgctgcaggggtcatgttggcagcttcctattggtctcttctggccccagcagttgagatggccacgtcctctgggggcttcggtgcctttgccttcttccctgtggctgttggcttcacccttggagcggcttttgtctacttggctgacctcctgatgcctcacttgggtgcagcagaagacccccagacggccctggcactgaacttcggctctacgttgatgaagaagaagtctgatcctgagggtcccgcgctgctcttccctgagagtgaactttccatccggatagacaagagtgagaatggtgaggcatatcagagaaagaaggcggcagccactggccttccagagggtcctgctgtccctgtgccttctcgagggaatctggcacagcccggcggcagcagctggaggaggatcgcactgctcatcttggccatcactatacacaacgttccagagggtctcgctgttggagttggatttggggctatagaaaagacggcatctgctacctttgagagtgccaggaatttggccattggaatcgggatccagaatttccccgagggcctggctgtcagccttcccttgcgaggggcaggcttctccacctggagagctttctggtatgggcagctgagcggcatggtggagcccctggccggggtctttggtgcctttgccgtggtgctggctgagcccatcctgccctacgctctggcctttgctgccggtgccatggtctacgtggtcatggacgacatcatccccgaagcccagatcagtggtaatgggaaactggcatcctgggcctccatcctgggatttgtagtgatgatgtcactggacgttggcctgggctagggctgagacgcttcggaccccgggaaaggccatacgaagaaacagcagtggttggcttctatgggacaacaagcttctttcttcacattaaaacttttttccttcctctcttcttcatctcattatcctgattgactctgattataatagaaccatttttactttgctttgagggagatttttgatttaatggggaattttaaggtgtcatggaaatacagattctttgttttggccactgaatggactctctcttcagtgggattatcaaggaacttcagatcagggaaatctccacttcgggaccttctatctgcctcccaactcctcaaggtcacctatagaagcgagctaccaaaagacgtctcctaagcattttggtggcctagtgactcagggcagagtggccagcacacctctcatccgcccctcctgctccatcactgctgagcctctccccatctagaatgttggaactggagcatcataaagatagcaagctaccttccaaggccgagccagcccagagaggagcatgtcttcctttacctccccctaaggagatactacatgggagggggacacagaaaaagggaaggaaattggctagtctggctttttttttttttttttttaaaggcaaagattgacattattgaaggaaaggggatgaggacaactgtgaactcacagtgagccctgtggaaagaagagacagacagagtgtgggtttgttcggaggcctctgctgtcaatggattccaggagcaaggccatttgtcgcgctttccaaatttcttaggcatttattttgataagtttatagccatcatgtttctaagagacttggagacaccagcaaactgctagaactcaaactcttcaattactcaaagaaggagccatttcagttaactcaagtgaatgaaagagttttggaatctgctgtgggtccttccctgttgaccatttggtaacttataatctgacaaaaactcttgagctgcaacaggccttgccagagggctcaggatgggaaaggaagaaggggataggaaaagaagaggtaattttacatttcccctttaaagtaaattttagccaactcatcattctgaaatgtccctataaagaatgagtcgaactagaccagaagccagcctactccttcttacatagcttctccaacaggggtagcaatgacctgtccacttcaaacacagataaggcctgccatcctcattggttaaaggcacacgtgagactttcagtgggctctgctgagaaggaaggcagcccaggagtcaggtatgcaggcattgcattgtcagtgtctgctctcagagtttacacattcaattgcttccaagggtgaatctcctgctctgtgaatgctatcagaccccaaaggccaaccttgggctgggtctatgtacgttcttccgaagcactgatgatcaaaattgaagacacattcagaggtttgattggttgagattaactggtgtggtggttggtgtatgtatgttttatttttatgtctttgtatgtagttctacataatgcaaattgtgctttctgatggacaagacctcataactgtgattaatatcaataaaaaggggatgttgtggaaaaaaaaaaaaaaaaaaaaaaaaaaaaaaaaaaaaaaaaaaaaaaaaaaaaaaaaaaaaaaaa

SEQ ID NO: 2136 - DNA, 2442 bp, Homo sapiens
ccacgcgtccggtggaaatattttctacacaatgaagtcaacaacttaatttaaaccagtgtttgtgcggttctgattcatctgctgtggttcccgaagcttgagatctaaggagtacagggtcttttgtgatgacaatatgactaatagtaaaggaagatctattaccgataaaacaagtggtggtccaagtagtggaggaggttttgtagattggactttacgtttaaacacaattcaatccgacaagtttttaaatttactcttgagtatggttccagtgatttaccagaaaaaccaagaagacaggcacaaaaaagcaaacggcatttggcaagatggattatcaactgcagtacagacttttagtaatagatctgagcaacacatggagtatcacagtttctcagagcagtcttttcatgccaataatgggcacgcatcatcaagctgcagccaaaagtatgatgactatgccaattataattactgtgatggaagggagacttcagaaaccactgccatgttacaagatgaagatatatctagtgatggtgatgaagatgctattgtagaagtgaccccaaaattaccaaaggaatccagtggcatcatggcattgcaaatacttgtgccctttttgctagctggttttggaacagtttcagctggcatggtactggatatagtacagcactgggaggtgttcagaaaagttacagaagttttcattttagtccctgcacttcttggtctcaaagggaacttggaaatgacattggcatccagattatccactgcagtaaatattgggaagatggattcacccattgaaaagtggaacctaataattggcaacttggctttaaagcaggttcaggcaacagtagtgggttttctagcagctgtggcagcaattatattgggctggattccagaaggaaaatattaccttgatcattccatacttctgtgctctagcagtgtggcaactgccttcattgcatctcttctgcagggaataataatggttggggttatcgttggttcaaagaagactggtataaatcctgataatgttgctacacccattgctgctagttttggcgaccttataactcttgccatattggcttggataagtcagggcttatactcctgtcttgagacctattactacatttctccattagttggtgtatttttcttggctctaacccctatttggattataatagctgccaaacatccagccacaagaacagttctccactcaggctgggagcctgtcataacagctatggttataagtagcattgggggccttattctggacacaactgtatcagacccaaacttggttgggattgttgtttacacgccagttattaatggtattggtggtaatttggtggccattcaggctagcaggatttctacctacctccatttacatagcattccaggagaattgcctgatgaacccaaaggttgttactacccatttagaactttctttggtccaggagtaaataataagtctgctcaagttctactgcttttagtgattcctggacatttaattttcctctacactattcatttgatgaaaagtggtcatacttctttaactataatcttcatagtagtgtatttatttggcgctgtgttacaggtatttaccttgctgtggattgctgactggatggtccatcacttctggaggaaaggaaaggacccggatagtttctccatcccctacctaacagcattgggtgatctgctcgggacagctctgttagccttaagttttcattttctttggcttattggagatcgagatggagatgttggagactaataaattctacaaactgctctcaagttaccaaggaagaaaatacacgacaaccacttatggctctttttcaaaactcttaaatcagtagtttgacttttgccagggtaatcttcagttggccctgattcaattaaatggccttaatttttttttaaggaatttgtgtcaaaaccagaatgaagagtattcgtgctgcttttcatagaataaatgataatttgacatagacatagatataagttccagctctgaaattaattaggaaagaatataggatgtttacagtgaataattttaaaaccacaaacatagcagaaatgtactttattattaaatttgtaatgcaggattagaagaagcagagctctagtttagcctttcttgtctcacagatgtgctgtatcccaggcatactataaaacgaagagtgcccaaccaagctttgaatcgtattaacaatgcccacctctatgctagctgaggataaatttaccagttgctcatatttaaactgacctaaatatgttttgctgagcataagataaactcacttttacctccatctaaaaaaaaaaaaaaaa

SEQ ID NO: 2137 - DNA, 3347 bp, Homo sapiens
agcctcggcgtgcccccaggaccggtaaagttcctctcgccagccgcatccatgcttctggcgcggatgaacccgcaggtgcagcccgagaacaacggggcggacacgggtccagagcagccccttcgggcgcgcaaaactgcggagctgctggtggtgaaggagcgcaacggcgtccagtgcctgctggcgccccgcgacggcgacgcgcagccccgggagacctggggcaagaagatcgacttcctgctgtccgtagtcggcttcgcagtggacctggccaacgtgtggcgcttcccctacctctgctacaagaacggcggcggtgccttcttgatcccgtacacactgttccttatcatcgcggggatgcccctgttctacatggagctggctctgggacagtacaaccgggagggggctgccaccgtttggaaaatctgcccattcttcaaaggcgttggctatgctgtcatcctgatcgccctgtacgttggcttctactacaacgtcatcatcgcctggtcactctactacctcttctcctccttcaccctcaacctgccctggaccgactgtggccacacctggaacagccccaactgtaccgaccccaagctcctcaatggctccgtgcttggcaaccacaccaagtactccaagtacaagttcacgccggcagccgagttttatgagcgtggtgtcctgcaccttcacgagagcagcgggattcatgacatcggcctgccccagtggcagctcttgctctgtctgatggtcgtcgtcatcgtcttgtattttagcctctggaaaggggtgaagacatcaggaaaggtggtgtggatcacagccacgctgccttacttcgtgctgttcgtgctcctggtccatggcgtcacgctgcccggagcctccaatggcatcaatgcctacctgcacatcgacttctaccgcttgaaagaggccacggtatggattgatgccgcaactcagatatttttttccttgggggctggatttggagtattgattgcatttgccagttacaacaaatttgacaacaactgttacagggatgccctgctgaccagcagcatcaactgtatcaccagcttcgtctctgggttcgccatcttctccatccttggttacatggcccatgaacacaaggtcaacattgaggatgtggccacagaaggagctggcctagtgttcatcctgtatccagaggccatttctaccctgtctggatctacattctgggctgttgtgtttttcgtcatgctcctggcgctgggccttgacagctcaatgggaggcatggaggctgtcatcacgggcctggcagatgacttccaggtcctgaagcgacaccggaaactcttcacatttggcgtcaccttcagcactttccttctcgccctgttctgcataaccaagggtggaatttacgtcttgaccctcctggacacctttgctgcgggcacctccatcctttttgctgtcctcatggaagccatcggagtttcctggttttatggagtggacaggttcagcaacgacatccagcagatgatggggttcaggccgggtctatactggagactgtgctggaagttcgtcagtcctgccttcctcctgttcgtggttgtggtcagcatcatcaacttcaagccactcacctacgacgactacatcttcccgccctgggccaactgggtggggtggggcatcgccctgtcctccatggtcctggtgcccatctacgtcatctataagttcctcagcacgcagggctctctttgggagagactggcctatggcatcacgccagagaacgagcaccacctggtggctcagagggacatcagacagttccagttgcaacactggctggccatctgagcctgcctggaggagaaggaggaacccccatgccaatgtccaggtcacaggcatccgctgcgctcccacctcggacaccatcttgggattcctcccctggaagttgtcctttctgatcctctcttcttttcccatttacaaatgatttcgtgactgtagtttttgttcaccttctgtgcatctggcctgggggctgttagctcagaggagaggagcaaacaggaaaatgacttctgttctgtccccgctgttttgggggaagtctctcccactttgggatcctgctgaagctaggttcatgaggtcggaaatccccaccacatttgcctagactttgggcacaggagttcttagtccaccaaatcagagagaggatgggcttttgatcagatacccctcccaaaaaaaaaaaaaactaaaactaaagcaaaaatcaaacaaaatctggctgagtttagtggggtggttggggaaggtacatagaccctcctcttgcccaccctagacagccctctcatgtctgaacctcagcctgggagttagatttatttgtctctaaaatgaagtcagtggatagatgctttgagggattttgagtagaaacattcatagttaattttcactctggccaatctgagtttgatgtgtgtgttctggaacattcctccagcttttggtggtcagatggcccagagatatgggggacaggaggaagagggtaaatgaaccacagtgagcaggttctaggaggtacctgcatcagacaagctggtggaggccacgtggcaagccacatctactgaggcctcatgctgctcttgctctgtaagacacggagcccagaaacccatctgcacttcctgagacctgcctggggaaacgggggcagggaccaagtgaggcctcatgtgtgtcttcaccgtgctgtcctcacaaggccaggtgggtgcccaaagggagcctgacaggctgttgtgttaatttattgttcttgcacacctgcacagcctccctctggggatcccacctggagtggaccaggggtcttgagaaatggagagttggctgcaaaaactctcatgcactagatgtggcaccttggagggcagggtgagacaagcagcccagaaatactctctcaagtggaggggagaattttgagagtggatggaacagtttggtggtttcagagaatttctaggtttctacttggatctacttctgatacaaacttgcacttggtgccctctggtggtgtttagttttagttccgtaagagaaatgattcctagtttgctaaattggtggcatctttgggaggggtttctgtttatggttagagtctcttacacccttgttggagggattcttattctgactgtgggagctcctgttgcgggatcttgggaaaaaataaagaagccgctgcattcgcacgtcaa

SEQ ID NO: 2138 - DNA, 4543 bp, Homo sapiens
cggcgggcggcgcgcacactgctcgctgggccgcggctcccgggtgtcccaggcccggccggtgcgcagagcatggcgggtgcgggcccgaagcggcgcgcgctagcggcgccggcggccgaggagaaggaagaggcgcgggagaagatgctggccgccaagagcgcggacggctcggcgccggcaggcgagggcgagggcgtgaccctgcagcggaacatcacgctgctcaacggcgtggccatcatcgtggggaccattatcggctcgggcatcttcgtgacgcccacgggcgtgctcaaggaggcaggctcgccggggctggcgctggtggtgtgggccgcgtgcggcgtcttctccatcgtgggcgcgctctgctacgcggagctcggcaccaccatctccaaatcgggcggcgactacgcctacatgctggaggtctacggctcgctgcccgccttcctcaagctctggatcgagctgctcatcatccggccttcatcgcagtacatcgtggccctggtcttcgccacctacctgctcaagccgctcttccccacctgcccggtgcccgaggaggcagccaagctcgtggcctgcctctgcgtgctgctgctcacggccgtgaactgctacagcgtgaaggccgccacccgggtccaggatgcctttgccgccgccaagctcctggccctggccctgatcatcctgctgggcttcgtccagatcgggaagggtgatgtgtccaatctagatcccaacttctcatttgaaggcaccaaactggatgtggggaacattgtgctggcattatacagcggcctctttgcctatggaggatggaattacttgaatttcgtcacagaggaaatgatcaacccctacagaaacctgcccctggccatcatcatctccctgcccatcgtgacgctggtgtacgtgctgaccaacctggcctacttcaccaccctgtccaccgagcagatgctgtcgtccgaggccgtggccgtggacttcgggaactatcacctgggcgtcatgtcctggatcatccccgtcttcgtgggcctgtcctgcttcggctccgtcaatgggtccctgttcacatcctccaggctcttcttcgtggggtcccgggaaggccacctgccctccatcctctccatgatccacccacagctcctcacccccgtgccgtccctcgtgttcacgtgtgtgatgacgctgctctacgccttctccaaggacatcttctccgtcatcaacttcttcagcttcttcaactggctctgcgtggccctggccatcatcggcatgatctggctgcgccacagaaagcctgagcttgagcggcccatcaaggtgaacctggccctgcctgtgttcttcatcctggcctgcctcttcctgatcgccgtctccttctggaagacacccgtggagtgtggcatcggcttcaccatcatcctcagcgggctgcccgtctacttcttcggggtctggtggaaaaacaagcccaagtggctcctccagggcatcttctccacgaccgtcctgtgtcagaagctcatgcaggtggtcccccaggagacatagccaggaggccgagtggctgccggaggagcatgcgcagaggccagttaaagtagatcacctcctcgaacccactccggttccccgcaacccacagctcagctgcccatcccagtccctcgccgtccctcccaggtcgggcagtggaggctgctgtgaaaactctggtacgaatctcatccctcaactgagggccagggacccaggtgtgcctgtgctcctgcccaggagcagcttttggtctccttgggccctttttcccttccctcctttgtttacttatatatatattttttttaaacttaaattttgggtcaacttgacaccactaagatgattttttaaggagctgggggaaggcaggagccttcctttctcctgccccaagggcccagaccctgggcaaacagagctactgagacttggaacctcattgctaccacagacttgcactgaagccggacagctgcccagacacatgggcttgtgacattcgtgaaaaccaaccctgtgggcttatgtctctgccttagggtttgcagagtggaaactcagccgtagggtggcactgggagggggtgggggatctgggcaaggtgggtgattcctcccaggaggtgcttgaggccccgatggactcctgaccataatcctagccccgagacaccatcctgagccagggaacagccccagggttggggggtgccggcatctcccctagctcaccaggcctggcctctgggcagtgtggcctcttggctatttctgtgtccagttttggaggctgagttctggttcatgcagacaaagccctgtccttcagtcttctagaaacagagacaagaaaggcagacacaccgcggccaggcacccatgtgggcgcccaccctgggctccacacagcagtgtcccctgccccagaggtcgcagctaccctcagcctccaatgcattggcctctgtaccgcccggcagccccttctggccggtgctgggttcccactcccggcctaggcacctccccgctctccctgtcacgctcatgtcctgtcctggtcctgatgcccgttgtctaggagacagagccaagcactgctcacgtctctgccgcctgcgtttggaggcccctgggctctcacccagtccccacccgcctgcagagagggaactagggcaccccttgtttctgttgttcccgtgaatttttttcgctatgggaggcagccgaggcctggccaatgcggcccactttcctgagctgtcgctgcctccatggcagcagccagggacccccagaacaagaagaccccgcaggatccctcctgagctcggggggctctgccttctcaggccccgggcttcccttctccccagccagaggtggagccaagtggtccagcgtcactccagtgctcagctgtggctggaggagctggcctgtggcacagccctgagtgtcccaagccgggagccaacgaagccggacacggcttcactgaccagcggctgctcaagccgcaagctctcagcaagtgcccagtggagcctgccgcccccgcctgggcaccgggaccccctcaccatccagtgggcccggagaaacctgatgaacagtttggggactcaggaccagatgtccgtctctcttgcttgaggaatgaagacctttattcacccctgccccgttgcttcccgctgcacatggacagacttcacagcgtctgctcataggacctgcatccttcctggggacgaattccactcgtccaagggacagcccacggtctggaggccgaggaccaccagcaggcaggtggactgactgtgttgggcaagacctcttccctctgggcctgttctcttggctgcaaataaggacagcagctggtgccccacctgcctggtgcattgctgtgtgaatccaggaggcagtggacatcgtaggcagccacggccccgggtccaggagaagtgctccctggaggcacgcaccactgcttcccactggggccggcggggcccacgcacgacgtcagcctcttaccttcccgcctcggctaggggtcctcgggatgccgttctgttccaacctcctgctctgggacgtggacatgcctcaaggatacagggagccggcggcctctcgacggcacgcacttgcctgttggctgctgcggctgtgggcgagcatgggggctgccagcgtctgttgtggaaagtagctgctagtgaaatggctggggccgctggggtccgtcttcacactgcgcaggtctcttctgggcgtctgagctggggtgggagctcctccgcagaaggttggtggggggtccagtctgtgatccttggtgctgtgtgccccactccagcctggggaccccacttcagaaggtaggggccgtgtcccgcggtgctgactgaggcctgcttccccctccccctcctgctgtgctggaattccacagggaccagggccaccgcaggggactgtctcagaagacttgatttttccgtccctttttctccacactccactgacaaacgtccccagcggtttccacttgtgggcttcaggtgttttcaagcacaacccaccacaacaagcaagtgcattttcagtcgttgtgcttttttgttttgtgctaacgtcttactaatttaaagatgctgtcggcaccatgtttatttatttccagtggtcatgctcagccttgctgctctgcgtggcgcaggtgccatgcctgctccctgtctgtgtcccagccacgcagggccatccactgtgacgtcggccgaccaggctggacaccctctgccgagtaatgacgtgtgtggctgggaccttctttattctgtgttaatggctaacctgttacactgggctgggttgggtagggtgttctggcttttttgtggggtttttatttttaaagaaacactcaatcatccta

SEQ ID NO: 2139 - DNA, 4040 bp, Homo sapiens
gtcgcctctcacccgccccggccgctccagcccgaggcgccccgaccccgcgccactccgcgcccggccagccgcccgcagccatggggctcctgcccaagctcggcgtgtcccagggcagcgacacctctactagccgagccggccgctgtgcccgctcggtcttcggcaacattaaggtgtttgtgctctgccaaggcctcctgcagctctgccaactcctgtacagcgcctacttcaagagcagcctcaccaccattgagaagcgctttgggctctccagttcttcatcgggtctcatttccagcttgaatgagatcagcaatgccatcctcatcatctttgtcagctactttggcagccgggtgcaccgtccacgtctgattggcatcggaggtctcttcctggctgcaggtgccttcatcctcaccctcccacacttcctctccgagccctaccagtacaccttggccagcactgggaacaacagccgcttgcaggccgagctctgccagaagcattggcaggacctgcctcccagtaagtgccacagcaccacccagaacccccagaaggagaccagcagcatgtggggcctgatggtggttgcccagctgctggctggcatcgggacagtgcctattcagccatttgggatctcctatgtggatgacttctcagagcccagcaactcgcccctgtacatctccatcttatttgccatctctgtatttggaccggctttcgggtacctgctgggctctatcatgctgcagatctttgtggactatggcagggtcaacacagctgcagttaacttggtcccgggtgacccccgatggattggagcctggtggctaggcctgctcatttcttcagctttattggttctcacctctttccccttttttttcttccctcgagcaatgcccataggagcaaagagggctcctgccacagcagatgaagcaaggaagttggaggaggccaagtcaagaggctccctggtggatttcattaaacggtttccatgcatctttctgaggctcctgatgaactcactcttcgtcctggtggtcctggcccagtgcaccttctcctccgtcattgctggcctctccaccttcctcaacaagttcctggagaagcagtatggcacctcagcagcctatgccaacttcctcattggtgctgtgaacctccctgctgcagccttggggatgctgtttggaggaatcctcatgaagcgctttgttttctctctacaaaccattccccgcatagctaccaccatcatcaccatctccatgatcctttgtgttcctttgttcttcatgggatgctccaccccaactgtggccgaagtctacccccctagcacatcaagttctatacatccgcagtctcctgcctgccgcagggactgctcgtgcccagattctatcttccacccggtctgtggagacaatggaatcgagtacctctccccttgccatgccggctgcagcaacatcaacatgagctctgcaacctccaagcaactgatctatttgaactgcagctgtgtgaccgggggatccgcttcagcaaagacaggatcgtgccctgtcccctgtgcccacttcctgctcccggccatcttcctcatctccttcgtgtccctgatagcctgcatctcccacaaccccctctacatgatggttctgcgtgtggtgaaccaggaggaaaagtcatttgccatcggggtgcagttcttgttgatgcgcttgctggcctggctgccatctccagccctctatggcctcaccattgaccactcctgcatccggtggaactcgctgtgcttggggaggcgaggggcctgcgcctactatgacaacgatgctctccgagacaggtacctgggcctgcagatgggctacaaggcgctgggcatgctgctgctttgcttcatcagctggagggtgaagaagaacaaggagtacaacgtgcagaaggcggcaggcctcatctgaccccaccctgggccactgcctgctccagagagtggaccttgactcttccacacctgcctatactcactaatgttaacacgtcatttcctttttgtatttttaaacaagaaagaaaaccccagtcctcatttgccttccctacctcttcctcccagagtcctccccacagttcctaagggccactgtgtacccgggctgtgtgggccagaactggggggctgagtcttccctggccccttggaagaggcccccagatgcccaggctcacttcagtgttgagtcctccattgaggatgcccactgaggcagccaggcccctcaccagccctggggggaatcctaaacagagagagaaaaagggtatctgcccttcttgccaggcagctccactctcccgctgactgcccacaccctgcagagtggcaggggtgaaaggaagaaggaagtggctgagttattaatagccagagccactgggagactggggagactggctgtaacccccttcacacctgggtttggcatcagcacagactacgggaggggctggctccctccccctcagaccctcacttcctgtacctagaggccattctggatgctgccatgttgggaagtacagtctctgcccattacctgcatgcaggcaccagagcagggactgagaaaccccaaggatgggtcatctaagtgctgtccatatgaaccctggactttctgtccttagatcctcacatgttatccctgtctttctggggtacgtttcaaactgaggaagctacaacacagtgaagacccaaggaaggcctatgaaatggtcctgatgcccaacctcccaccccttcaatgtggggacgagaccccctcatctcagagtaatgggaagaacctcccacatctccctggcagcagatgaggtggcttcacatgcacttccctgtctggacttcagcccgtattccgaggagtagagaggcagaagagatgtcagcaaagcaagtgatgaagcagagtggatgtccactgtcaccaagctggatggcaagctgcggcccacaaaacagccagtcaggttggctttcctggtttcagacatgctcataccattcccattttctcagcctcttctctgcctccagagaggtggatgcctgggttgagagacacagctgctacgtgatagatgttgagagacagaagccaacgaaggaggtcattcatcaacaaatatatttattggagaccgactttgtgcaaagcaatgctaatcagggttctccatggagcttccctcagctcttacctcacctccctccatttacattagggccttctcccagggtgtgctcggtgggcagtgtgggactgggggtgtgggagttggtgagagcaggaggagaggtggggacagcaagaagccacagattggcatgaaggatcctgacctgactatccatgccatccatggcccccagactgactctgcacctggccctttgccagacagctctgtctccccatgtcctctggaacagctgggcatgggtcatggccattcatgacccttaagtgccacccttcttggaagaccccctccagaagcatactggaagccacctctggaaaagcctcatatggtgatatgccaaaatatttatgtcaatgtccaaacaaagtccaatgccatgagactgaagtctttgtggaaaccactgttacagacaagcttatttccaaagccacctcatttccaaacatctcactcaggaagggaggctcaatgtaacctcaggggccagttttagcatttgaaatggttctgcttggaaaatgatgccctgcaactaaccctggtctttcccatggcaatttaaccacatttggaaggcactgccttcagctgagtttatgaacaatgaatgccaaccttcaggttctagaagattggttgcactcccaaacctttattctattatattactattaaaatattctaattttgctattgaggtaaaaaaaaaaaaa

SEQ ID NO: 2140 - DNA, 5015 bp, Homo sapiens
gcgctccgcacctgggcactcccagcgatgcgcagcggggcagcgccggccccgccgatggagctgctgttgctgccgccgccgccgcccggagcgccccgctccgcccgcgccccgtgcgcctgagcaccgagctcgcccctcctccgcgctaactccgccgcccgctccccaggccgcccgcgctccccgcgcgcctcctcgggctccacgcgtcttgccccgcagaggcagcctcctccaggagcggggccctgcacaccatggcccccgggtgggcaggggtcggcgccgccgtgcgcgcccgcctggcgctggccttggcgctggcgagcgtcctgagtgggcctccagccgtcgcctgccccaccaagtgtacctgctccgctgccagcgtggactgccacgggctgggcctccgcgcggttcctcggggcatcccccgcaacgctgagcgccttgacctggacagaaataatatcaccaggatcaccaagatggacttcgctgggctcaagaacctccgagtcttgcatctggaagacaaccaggtcagcgtcatcgagagaggcgccttccaggacctgaagcagctagagcgactgcgcctgaacaagaataagctgcaagtccttccagaattgcttttccagagcacgccgaagctcaccagactagatttgagtgaaaaccagatccaggggatcccgaggaaggcgttccgcggcatcaccgatgtgaagaacctgcaactggacaacaaccacatcagctgcattgaagatggagccttccgagcgctgcgcgatttggagatccttaccctcaacaacaacaacatcagtcgcatcctggtcaccagcttcaaccacatgccgaagatccgaactctgcgcctccactccaaccacctgtactgcgactgccacctggcctggctctcggattggctgcgacagcgacggacagttggccagttcacactctgcatggctcctgtgcatttgaggggcttcaacgtggcggatgtgcagaagaaggagtacgtgtgcccagccccccactcggagcccccatcctgcaatgccaactccatctcctgcccttcgccctgcacgtgcagcaataacatcgtggactgtcgaggaaagggcttgatggagattcctgccaacttgccggagggcatcgtcgaaatacgcctagaacagaactccatcaaagccatccctgcaggagccttcacccagtacaagaaactgaagcgaatagacatcagcaagaatcagatatcggatattgctccagatgccttccagggcctgaaatcactcacatcgctggtcctgtatgggaacaagatcaccgagattgccaagggactgtttgatgggctggtgtccctacagctgctcctcctcaatgccaacaagatcaactgcctgcgggtgaacacgtttcaggacctgcagaacctcaacttgctctccctgtatgacaacaagctgcagaccatcagcaaggggctcttcgcccctctgcagtccatccagacactccacttagcccaaaacccatttgtgtgcgactgccacttgaagtggctggccgactacctccaggacaaccccatcgagacaagcggggcccgctgcagcagcccgcgccgactcgccaacaagcgcatcagccagatcaagagcaagaagttccgctgctcaggctccgaggattaccgcagcaggttcagcagcgagtgcttcatggacctcgtgtgccccgagaagtgtcgctgtgagggcacgattgtggactgctccaaccagaagctggtccgcatcccaagccacctccctgaatatgtcaccgacctgcgactgaatgacaatgaggtatctgttctggaggccactggcatcttcaagaagttgcccaacctgcggaaaataaatctgagtaacaataagatcaaggaggtgcgagagggagctttcgatggagcagccagcgtgcaggagctgatgctgacagggaaccagctggagaccgtgcacgggcgcgtgttccgtggcctcagtggcctcaaaaccttgatgctgaggagtaacttgatcggctgtgtgagtaatgacacctttgccggcctgagttcggtgagactgctgtccctctatgacaatcggatcaccaccatcacccctggggccttcaccacgcttgtctccctgtccaccataaacctcctgtccaaccccttcaactgcaactgccacctggcctggctcggcaagtggttgaggaagaggcggatcgtcagtgggaaccctaggtgccagaagccatttttcctcaaggagattcccatccaggatgtggccatccaggacttcacctgtgatggcaacgaggagagtagctgccagctgagcccgcgctgcccggagcagtgcacctgtatggagacagtggtgcgatgcagcaacaaggggctccgcgccctccccagaggcatgcccaaggatgtgaccgagctgtacctggaaggaaaccacctaacagccgtgcccagagagctgtccgccctccgacacctgacgcttattgacctgagcaacaacagcatcagcatgctgaccaattacaccttcagtaacatgtctcacctctccactctgatcctgagctacaaccggctgaggtgcatccccgtccacgccttcaacgggctgcggtccctgcgagtgctaaccctccatggcaatgacatttccagcgttcctgaaggctccttcaacgacctcacatctctttcccatctggcgctgggaaccaacccactccactgtgactgcagtcttcggtggctgtcggagtgggtgaaggcggggtacaaggagcctggcatcgcccgctgcagtagccctgagcccatggctgacaggctcctgctcaccaccccaacccaccgcttccagtgcaaagggccagtggacatcaacattgtggccaaatgcaatgcctgcctctccagcccgtgcaagaataacgggacatgcacccaggaccctgtggagctgtaccgctgtgcctgcccctacagctacaagggcaaggactgcactgtgcccatcaacacctgcatccagaacccctgtcagcatggaggcacctgccacctgagtgacagccacaaggatgggttcagctgctcctgccctctgggctttgaggggcagcggtgtgagatcaacccagatgactgtgaggacaacgactgcgaaaacaatgccacctgcgtggacgggatcaacaactacgtgtgtatctgtccgcctaactacacaggtgagctatgcgacgaggtgattgaccactgtgtgcctgagctgaacctctgtcagcatgaggccaagtgcatccccctggacaaaggattcagctgcgagtgtgtccctggctacagcgggaagctctgtgagacagacaatgatgactgtgtggcccacaagtgccgccacggggcccagtgcgtggacacaatcaatggctacacatgcacctgcccccagggcttcagtggacccttctgtgaacaccccccacccatggtcctactgcagaccagcccatgcgaccagtacgagtgccagaacggggcccagtgcatcgtggtgcagcaggagcccacctgccgctgcccaccaggtttcgccggccccagatgcgagaagctcatcactgtcaacttcgtgggcaaagactcctacgtggaactggcctccgccaaggtccgaccccaggccaacatctccctgcaggtggccactgacaaggacaacggcatccttctctacaaaggagacaatgaccccctggcactggagctgtaccagggccacgtgcggctggtctatgacagcctgagttcccctccaaccacagtgtacagtgtggagacagtgaatgatgggcagtttcacagtgtggagctggtgacgctaaaccagaccctgaacctagtagtggacaaaggaactccaaagagcctggggaagctccagaagcagccagcagtgggcatcaacagccccctctaccttggaggcatccccacctccaccggcctctccgccttgcgccagggcacggaccggcctctaggcggcttccacggatgcatccatgaggtgcgcatcaacaacgagctgcaggacttcaaggccctcccaccacagtccctgggggtgtcaccaggctgcaagtcctgcaccgtgtgcaagcacggcctgtgccgctccgtggagaaggacagcgtggtgtgcgagtgccgcccaggctggaccggcccactctgcgatcaggaggcccgggacccctgcctcggccacagatgccaccatggaaaatgtgtggcaactgggacctcatacatgtgcaagtgtgccgagggctatggaggggacttgtgtgacaacaagaatgactctgccaatgcctgctcagccttcaagtgtcaccatgggcagtgccacatctcagaccaaggggagccctactgcctgtgccagcccggctttagcggcgagcactgccaacaagagaatccgtgcctgggacaagtagtccgagaggtgatccgccgccagaaaggttatgcatcatgtgccacagcctccaaggtgcccatcatggaatgtcgtgggggctgtgggccccagtgctgccagcccacccgcagcaagcggcggaaatacgtcttccagtgcacggacggctcctcgtttgtagaagaggtggagagacacttagagtgcggctgcctcgcgtgttcctaagcccctgcccgcctgcctgccacctctcggactccagcttgatggagttgggacagccatgtgggaccccctggtgattcagcatgaaggaaatgaagctggagaggaaggtaaagaagaagagaatattaagtatattgtaaaataaacaaaaaatagaacttatttttattatggaaa

SEQ ID NO: 2141 - DNA, 3383 bp, Homo sapiens
agtggtcgagtgtcgggaggaaggactgcttgtgtgcggggtgggggggggtggtggagagcgggggcggggattcagcgcgtgtatgtaaaggtgcagcccgtgtgctaggcgctgggtgcgcgcgcggtgtctgctcgggtgcgcgcgcgcgccgctgcccgcctgcccgccggcccgcctgctcgcctgctggggctgctccgtgggtttgacgggcgagcgggcgcggaggagctctgtccggaatcacatagataccatcgtggaaacagcagcgcaggtcacggcgccgcgggccctgcaccagacgctgggctctagagattatttctctttattcagaagcatacagttgtttgctgattgcaagaagatgtttctgtggctgtttctgattttgtcagccctgatttcttcgacaaatgcagattctgacatatcggtggaaatttgcaatgtgtgttcctgcgtgtcagttgagaatgtgctctatgtcaactgtgagaaggtttcagtctacagaccaaatcagctgaaaccaccttggtctaatttttatcacctcaatttccaaaataattttttaaatattctgtatccaaatacattcttgaatttttcacatgcagtctccctgcatctggggaataataaactgcagaacattgagggaggagcctttcttgggctcagtgcattaaagcagttgcacttgaacaacaatgaattaaagattctccgagctgacactttccttggcatagagaacttggagtatctccaggctgactacaatttaatcaagtatattgaacgaggagccttcaataagctccacaaactgaaagttctcattcttaatgacaatctgatttcattccttcctgataatattttccgattcgcatctttgacccatctggatatacgagggaacagaatccagaagctcccttatatcggggttctggaacacattggccgtgtcgttgaattgcaactggaagataacccttggaactgtagctgtgatttattgcccttaaaagcttggctggagaacatgccatataacatttacataggagaagctatctgtgaaactcccagtgacttatatggaaggcttttaaaagaaaccaacaaacaagagctatgtcccatgggcaccggcagtgattttgacgtgcgcatcctgcctccatctcagctggaaaatggctacaccactcccaatggtcacactacccaaacatctttacacagattagtaactaaaccaccaaaaacaacaaatccttccaagatctctggaatcgttgcaggcaaagccctctccaaccgcaatctcagtcagattgtgtcttaccaaacaagggtgcctcctctaacaccttgcccggcaccttgcttctgcaaaacacacccttcagatttgggactaagtgtgaactgccaagagaaaaatatacagtctatgtctgaactgataccgaaacctttaaatgcgaagaagctgcacgtcaatggcaatagcatcaaggatgtggacgtatcagacttcactgactttgaaggactggatttgcttcatttaggcagcaatcaaattacagtgattaagggagacgtatttcacaatctcactaatttacgcaggctatatctcaatggcaatcaaattgagagactctatcctgaaatattttcaggtcttcataacctgcagtatctgtatttggaatacaatttgattaaggaaatctcagcaggcacctttgactccatgccaaatttgcagttactgtacttaaacaataatctcctaaagagcctgcctgtttacatcttttccggagcacccttagctagactgaacctgaggaacaacaaattcatgtacctgcctgtcagtggggtccttgatcagttgcaatctcttacacagattgacttggagggcaacccatgggactgtacttgtgacttggtggcattaaagctgtgggtggagaagttgagcgacgggattgttgtgaaagaactgaaatgtgagacgcctgttcagtttgccaacattgaactgaagtccctcaaaaatgaaatcttatgtcccaaacttttaaataagccgtctgcaccattcacaagccctgcacctgccattacattcaccactcctttgggtcccattcgaagtcctcctggtgggccagtgcctctgtctattttaatcttaagtatcttagtggtcctcattttaacggtgtttgttgctttttgccttcttgtttttgtcctgcgacgcaacaagaaacccacagtgaagcacgaaggcctggggaatcctgactgtggctccatgcagctgcagctaaggaagcatgaccacaaaaccaataaaaaagatggactgagcacagaagctttcattccacaaactatagaacagatgagcaagagccacacttgtggcttgaaagagtcagaaactgggttcatgttttcagatcctccaggacagaaagttgttatgagaaatgtggccgacaaggagaaagatttattacatgtagataccaggaagagactgagcacaattgatgagctggatgaattattccctagcagggattccaatgtgtttattcagaattttcttgaaagcaaaaaggagtataatagcataggtgtcagtggctttgagatccgctatccagaaaaacaaccagacaaaaaaagtaagaagtcactgataggtggcaaccacagtaaaattgttgtggaacaaaggaagagtgagtattttgaactgaaggcgaaactgcagagttcccctgactacctacaggtccttgaggagcaaacagctttgaacaagatctaggtcatgtaatcttacttcatacagaggacatttatttaatgatgaaagtgccttttgttgacttctaacttccaaatactatattatcaataggcatggaggcaggtgtttccaagggtgtctcattaactgtagctgcaaagatgtgtcaagtagaagagaatttgtttaatagattttactacataaaacctatactgtggagtcctgtggggatactgcaaactctattgccaaagggatgctttatacacataatactgaatttaacctcaagaggcaaatctgttttgtaccccaatgcaaaaccttcgtctctttgtgctttgtaaagcaaactcaagaaaactggtacacctgtaccagctgggtcctttatcttgcacgtagattaagttggtggaactggaataatccttttgatttgtggcattgtaacaactccgtgtaaagattatctgaaaagtaaaaaaaaaaaaaaaaaaaaaaaaaa

SEQ ID NO: 2142 - DNA, 2245 bp, Homo sapiens
acattgactgtaaaggaaccaatgtgaagagtggtgtttcctgagcaaacggtgacttaaaaaaaaaaaaaaaaaagtggtggggtggaggtcagcagtgccacagaacaaactggagttaagaaatgtcgttcttcagatttaaaaagaaaacctttactgaatcagctgagtgttaataatacgaatttccttttcttgccaattctgatctgaacagaaaatccaagaacagggatatgtgtggattacagttttctctgccttgcctacgactgtttctggttgttacctgttatcttttattattactccacaaagaaatacttggatgttcgtctgtttgtcagctctgcactgggagacaaattaactgccgtaacttaggcctttcgagtattcctaagaattttcctgaaagtacagtttttctgtatctgactgggaataatatatcttatataaatgaaagtgaattaacaggacttcattctcttgtagcattgtatttggataattctaacattctgtatgtatatccaaaagcctttgttcaattgaggcatctatattttctatttctaaataataatttcatcaaacgcttagatcctggaatatttaagggacttttaaatcttcgtaatttatatttacagtataatcaggtatcttttgttccgagaggagtatttaatgatctagtttcagttcagtacttaaatctacaaaggaatcgcctcactgtccttgggagtggtacctttgttggtatggttgctcttcggatacttgatttatcaaacaataacattttgaggatatcagaatcaggctttcaacatcttgaaaaccttgcttgtttgtatttaggaagtaataatttaacaaaagtaccatcaaatgcctttgaagtacttaaaagtcttagaagactttctttgtctcataatcctattgaagcaatacagccctttgcatttaaaggacttgccaatctggaatacctcctcctgaaaaattcaagaattaggaatgttactagggatgggtttagtggaattaataatcttaaacatttgatcttaagtcataatgatttagagaatttaaattctgacacattcagtttgttaaagaatttaatttaccttaagttagatagaaacagaataattagcattgataatgatacatttgaaaatatgggagcatctttgaagatccttaatctgtcatttaataatcttacagccttgcatccaagggtccttaagccgttgtcttcattgattcatcttcaggcaaattctaatccttgggaatgtaactgcaaacttttgggccttcgagactggctagcatcttcagccattactctaaacatctattgtcagaatcccccatccatgcgtggcagagcattacgttatattaacattacaaattgtgttacatcttcaataaatgtatccagagcttgggctgttgtaaaatctcctcatattcatcacaagactactgcgctaatgatggcctggcataaagtaaccacaaatggcagtcctctggaaaatactgagactgagaacattactttctgggaacgaattcctacttcacctgctggtagattttttcaagagaatgcctttggtaatccattagagactacagcagtgttacctgtgcaaatacaacttactacttctgttaccttgaacttggaaaaaaacagtgctctaccgaatgatgctgcttcaatgtcagggaaaacatctctaatttgtacacaagaagttgagaagttgaatgaggcttttgacattttgctagcttttttcatcttagcttgtgttttaatcatttttttgatctacaaagttgttcagtttaaacaaaaactaaaggcatcagaaaactcaagggaaaatagacttgaatactacagcttttatcagtcagcaaggtataatgtaactgcctcaatttgtaacacttccccaaattctctagaaagtcctggcttggagcagattcgacttcataaacaaattgttcctgaaaatgaggcacaggccattctttttgaacattctgctttataactcaactaaatattgtctataagaaacttcagtgccatggacatgatttaaactgaaacctccttatataattatatactttagttggaaatataatgaattatatgaggttagcattattaaaatatgtttttaat

SEQ ID NO: 2143 - DNA, 3570 bp, Homo sapiens
aggaaattagtgcgcatgtgccggtcatccggaagttaccgcagtggccgccggaattaggcgaaaagccggaagtaaacattacgagattggcttggattctgtcggatggacttggggctagctgcggcggggctggaggaggccagataaccatgtcagccacagttgtagatgcagttaatgctgcacccctatcggggtccaaagaaatgagtttggaagaaccaaagaagatgaccagagaggactggagaaagaagaaggagctagaagaacagcgaaaattgggcaatgctcctgcagaagttgatgaagaaggaaaagacatcaacccccatattcctcagtatatttcttcagtgccatggtatattgatccttcaaaaagacctactttaaaacaccagagaccacaaccagaaaaacaaaagcagttcagctcatctggagaatggtacaagaggggtgtaaaagagaattccataattactaagtaccgcaaaggagcatgtgaaaattgtggggccatgacacacaaaaagaaagactgctttgagagacctaggcgagttggagccaaatttacaggtactaatatagctccagatgaacatgtccagcctcaactgatgtttgactatgatgggaagagggatcggtggaatggctacaatccagaagaacacatgaaaattgttgaagagtatgccaaagttgatttggcaaaacgaacattgaaagcccagaaactccaagaggaattagcctcaggaaaattagtggaacaggctaattctccaaaacaccagtggggagaagaggaaccaaattctcagatggaaaaagatcataatagtgaagatgaggatgaagataaatatgcagatgatattgacatgcctggacagaattttgactccaagagacgaattactgtccggaatctcaggattcgagaagatattgcaaaatatttgaggaatttagatccaaattctgcctactatgatccaaaaactagagcaatgagagagaatccttatgccaatgcaggaaagaatccagatgaagtgagttatgctggagataactttgttaggtacacaggagataccatttcaatggctcagacacagttgtttgcatgggaagcctatgacaagggatctgaagtgcatctacaggcagatcctacaaagctagagctgttgtataagtccttcaaagtcaaaaaagaagatttcaaagaacagcagaaagaaagcatcctggaaaagtatggtggccaagaacatttggatgcccctccagctgaattgcttttagcccagactgaagactatgtggagtactcaagacatgggacagtcatcaaaggacaggagcgggctgttgcctgctctaagtatgaggaggatgtgaagatccacaatcacacacatatctggggatcgtactggaaagaaggccgatggggatacaaatgctgtcactcttttttcaagtattcctattgtactggagaagctgggaaggagattgttaactctgaggagtgtattataaatgagataactggggaagaatctgtgaaaaaacctcaaaccctcatggagctgcatcaagaaaaactgaaagaggaaaagaagaagaagaaaaagaaaaagaagaagcatcgaaagagcagttcagatagtgatgatgaagaaaagaagcatgaaaaattgaaaaaggcactgaacgcagaggaggcccgccttcttcatgtcaaggagaccatgcagattgatgagaggaagcggccttacaatagcatgtatgaaactcgagaacctactgaagaggaaatggaggcatatagaatgaaacgtcagaggccagatgaccccatggcctctttccttggacagtagcaactagtcagaagaccatccaagatagatgcagctgatacattcttttcagcttcttattgatgattgtagatagaaaaatccttgtttattcttcttgctgcctggctttaataaatatttcagatgcctcacagtaagttcactcctttccatactgaggaaacaagaaaagaagaagaggcacatgaagtgtgcttttgggaatagaatttaaaattggattaagattttatttccagttttttttatttatttatttttttttttgagacggagtcttgctctgtcgcccaggctgaagtgcggtggcgcgatctcggctcactgcaagctccacctcccaggttcacgccattctcctgcctcagcctccctagtagttgggactacaggcgcccgccaccatgctcagctaattttttgtatttttagtagagacggtttcatcgtgttagccaggatggtctcgatctcctgaccttgtgatccacccgcctcagcctcccaaagtgctgagattacaggcgtgagccaccgcgcctggcctatttccagttttatgtgagtcatgtaaaaaagccttggctctctacctattaagaatgtctctttctctgtatttattaagcttcaaactttattgcttcgatttttgtggccctatatttagtattagcacaccttggttttgagaaaaaaacagggctttgtttttttaaataattactagcaactctgtgactacatttatttttattttttttagagacaggatcttgctatgttgcccaggctagagagcagtggcttttcacagacaaagtcataatgccctgcagtcttgggctcaagcgattctctcttccttggcctctggagtagactaaatgtgttagtctttgaatggaaaacaactattttctcatcattgggtcaatattgactgatcagtagtaggtcttttaccattctggacataagtctaggtgtagaaatcctttcctttatcatagaggatatggtttacattaccgtttgttttcattgtgattgcccctatgtaacaatcatgaatattagattttttaaattgtagaatatcctaatatttatagccagcagctgttactttgtttgtaaaatttgcaaaaaaacaaaacctgaagttggtttattgaaagaattataaggatagcttctagggatattagtaatagattgccatgatcctgaagcctcttctcagaacactgtgaagataatactgacagtagaatcagtgaaaacagcctaacaaaacctctgacatcagtatatcaacttttaacagcccactcactggcttttctaaactaccaaaaaccacctgtaggatactgcattaagtcagcatctcagaaacagtggtgtgagtaactgagtcaaattgtcaagtactttggatatacatagtgtcgagctttagattggtatgaaattaaacagcaatgcaaatagatttaattcctatttactttaagaatgaaaaacaatgttcattttcctacctaaacagggtggttcaacataaaggctgatgttgtgtccgttttgtattttatcttttgttaaagatacataaatgacaatacttaactgtgaaaaaaaaaaa

SEQ ID NO: 2144 - DNA, 1296 bp, Homo sapiens
gtgaaagagcaggttctgcttctttggtgtagtcctgaagcttcctaagaaacttcacatcaggtgatggataggagcaaccctgtaaaaccagccttagactatttttcaaacaggctggtgaattaccagatctccgtcaagtgcagtaaccagttcaagttggaagtgtgtcttttgaatgcagaaaacaaagtcgtggacaaccaggctgggacccagggccagctgaaggtgctgggtgccaacctctggtggccgtacctgatgcacgaacaccccgcctacctgtactcgtgggaggatggtgattgctcacaccaaagccttggacccctcccagcctgtgacctttgtgaccaactccacctacgcagcagacaagggggctctgtatgtggatgtgatccgtgtgaacagctactactcttggtatcgcaactacgggcacctggagttgattcagctgcagctggccgcccagtttgagaattggtgtaagacatcacaatcccattattcagagcgcgtatggagtggaaacgcttgtagggcttcaccaggtaagcggtgttgaactttctgcttgtgtattctctctgggcagagatgccacttgcctcccccaccatgccatctctgaagaatattacagaccattttggagcatggtgaataagaaattttcaccttaggagttcagttgaatagtcatttttatatttgtgactgcaagtcactcttaggggctgtacttccttagtactggtagcattattatccaatggacttttatagctttcattaggttttcttttgtttttgttctttaaagaacgttttacttatcttagtatttcatttttcatctatattatgaggcagtaagagtcttctgtttttccaaagttgagactgctttatatttatttcgtattgtctacagctgtagtgttcaatacattagccactagccacatgtggttatttaaataagataaaataaaaattggccgggcgtggtggctcacgccggtaatcccagcactttgggaggccgaggcgggcagatcattaggtcaggagatcgagaccatccttactaagacggtgaacccccatctctattaaaaatacaaaaaattagccgggcgtggtggcgggcgcctgcagtcccagctactcaggaggctgaggcaggagaatggcgtgaacctgggaggcagagtttgcagtgagccgagatggcgccactgcactccagcctgggggacagagcgagactccatctcaaaa

SEQ ID NO: 2145 - DNA, 1327 bp, Homo sapiens
ggtcgacgacgtggcagccgggatgcactaggcaaagccagctgggctcctgagtccggtgggtacttggagaacttactacgtctagctggaggattgtaaatgtaccaatcagcatgctgtgtctagctcaagaactcaagctccatgaggagatgtttcattgtcgagagcagtcatgatggcctgcactccacacaatgcaacagagtgaaagagcaggttctgcttctttggtgtagtcctgaagcttcctaagaaacttcacatcaggtgatggataggagcaaccctgtaaaaccagccttagactattttttaaacaggctggtgaattaccagatctccgtcaagtgcagtaaccagttcaagttggaagtgtgtcttttgaatgcagaaaacaaagtcgtggacaaccaggctgggacccagggccagctgaaggtgctgggtgccaacctctggtggccgtacctgatgcacgaacaccccgcctacctctactcgtgggaggatggtgattgctcacaccaaagccttggacccctcccagcctgtgacctttgtgaccaactccacctacgcagcagacaagggggctctgtatgtggatgtgatccgtgtgaacagctactactcttggtatcgcaactacgggcacctggagttgattcagctgcagctggccgcccagtttgagaattggtgtaagacatcacaatcccattattcagagcgcgtatggagtggaaacgcttgtagggtttcaccagtctttcccagggaactccgatgaagtgttccaacaaaatgagcgagtgaaccaagaagaggatgacattagatccaggagatacaacagaggagataatctccaggatgcctgtgaagaaagatccctggatcccaggatgattataggacaagttgttcataatccagcaggccagaagacttccagggaaactcattcaaggaggtgaaaatgatggatgactcctccaagatgaaaatggaccagccgcagtgctcacgcctgtaataccagcactttgggaggctgaggcaggcggatcacttgaggtcaggagtttgaaactagcctggccaacgtggcaaaactccatctctattaaaaatacaaaaattagccaggcatagtggtgcatgcctgtagtcccagctacttgggatgccgaggcaggaagaattgcttgaacctgggaggcagagtctgcagtgagccgagatcatgccactgcactccagcctgggtgacagagccactccgtctcaaaaaaaaaaaaaaaaaaaaaaaaaaaaaaaa

SEQ ID NO: 2146 - DNA, 5763 bp, Homo sapiens
gcgcaaggcacctgctggcaatggcaggaggcggacgtggggggtcgtgcagtaggtactggagggagagacgtgggcacaaaggtcgcgggaggaacaggtgcccacaatggctgcatatttgcccgtggatcactgaagattcctgctctcctgctgaggtggagactgcagtgagctgagatcgcaccattgcactccagcctgggcaacgagtgcaaaactcagtctccagataaaaaaaagaaaaagaaaaaaaagaggccgggtgtggtggcttatgcctatgatcctagcactttgggaggtcggggtggacggatcacgagatcaggagttggaggccagcctggccaacatagtgaaagcccgtctctagtaaaaatacaaaatttagtcagacatggtgggcaggagagagcatgtgcaggggaacatccatttataaaaccatcagacctcatgagacttattcactaccatgagaacagcatgggggaaactgcctccatgattcagttatctccacctggccccacccttgacacatgggaattgttacaattcaagatgagatttgggtgcggacagagccaaaccatataattcttccccggcccctcccaaatctcatgtcctcatatttcaaaagcaatcatgccttcccctaagtcccccaaactcttatttcagcattaactcaaaattccatagtccaaagtctcatctgagacaaggcaagtcccttccacctatgagcctgtaaaatcaaaagcaagttagttattttctagatacacagggatacaggcattgggtaaatacactcgtttcaaatgggagaaattggccaaagcgaaagagctacaggccccatgcaagtccaaaacccagcaggcaaatcttaaagctccaaaatgacctcctttgactccatgtgtcacatctaggtgatgcaagaagtgggttcccagggtcttgggcagccccgcccctgtggctttgcagggtacagccccccttctggctgcattgagtgtctgcagcttttccaggcacacagtgcaagctgtcagtggatctaccattctggggtctggaggatggtggcccttttctcacagctctgcttggcagtaccccagtggggactctgtgtgggagctccaaccccatatttccctttgacactgtcctagcagaggttatccatgagggcccccccctcccctcccccccacagcaaacttttgcctggatttccaggcattttcatacatcttctgaaatgtaggcggaggttcatgaacgttaattcttgactttggtgcatctgcaggcttaacaccacctagaacctgaaaggcttggaacttgcaccctctgaagccatggcctgaggtgtaccttggccccttttacctatggcaggagcagctgggatgcagggccccaagttcctaggctgcacacagcagggggttctggacccacaaaaccatttttccttctaagcctcctggcctgtgatgggagggtctgctgtgagggtctctaacatgccctggagacatttgccccattgtcttggtgattaacatttggctcctcattacttatgcaaatttctacaacccagtctcctgagaaaatagatttttcttttctgttgcatcatcaggctacaaattttctgaacttttatgctctgcttcttctcgaatgctttgctgcttagaaatttcttctgtcagataccttcaatcatctctctcaagttcaaagttccacagatctgtagggaactctagaaagaaattcttattttccctctttcccgcctatcttatgcccgtttctaatacaggtgcacaatgcctgcagtgtctttgcatagtaagagtgactttactccatttcccaacaaattcctcatctccctctgagaccacctccgcctggaccttgttgtccatatcactattaacattttggtcaaagccattcaacaagtctctaggaagttccaaactttcccacattttcctatcctcttctgagccttccaaactgttccagcctctccctgttacccatttccaaagttgcttccacattttcgggtatctttacagcagcaccccactctactggtatcaacttattgtattagtctgttctcacaccgcaaataaagacatacctgagactgggtaatttataaaggaaagaggttgaattgactcacagttctgcatggctggggaggcctcacaatcatggtggaaggcaaggaggtgcaaaagcatgtctcacatagtggcaggcaggagagagcatgtgcaggggagctcccatttataaaaccatcagatctcatgagacttagtcactaccgcgagaacagtatggggggaaccatccccatgattcagttatctgcacccggccccacccttgacacgtgggaattattacaatgcaagggctggtgaattaccagatctccgtcaagtgcagtaaccagttcaagttggaagtgtgtcttttgaatgcagaaaacaaagtcgtggacaaccaggctgggacccagggccagctgaaggtgctgggtgccaacctctggtggccgtacctgatgcacgaacaccccgcctacctgtactcgtgggaggatggtgattgctcacaccaaagccttggacccctcccagcctgtgacctttgtgaccaactccacctacgcagcagacaagggggctctgtatgtggatgtgatccgtgtgaacagctactactcttggtatcgcaactacgggcacctggagttgattcagctgcagctggccgcccagtttgagaattggtgtaagacatcacaatcccattattcagagcgcgtatggagtggaaacgcttgtagggtttcaccaggatccacctctgatgttcagtgaagaggaccggaaaagtctgctagagcagtaccatctgggtctggatcaaaaacgcagaaaatacgtggttggagagctcatctggaattttgccgatttcatgactaaccagtccaaggatgaaggaaaaactggacctcattatggatttacttttgggatacactcattattccagaggagggtaaaaggctgagaagcttaagacttgctataattctgtgagagagctataaaagtctgctcagaaacattataacgtaaaatggacagagaaggacaatgagatatttaatttgccacggcaaagccattgctgtgaagaatggataatatatgtcaatggtaatatatgaagaaataacacagatggagctggcttgaaatcctcttgtttatggcagtacatatcgtttatgattcaaaaaatatagcccatttccaaaaacctgcaacaaagagatactttctcaggtgtcagtttcttggtcgggaatgaaaatagtgccaacctgtgataccttcactctaattttactttctgaggaagttttctgtaatagttatttggtgataattattaatactggtgagaaaatcaatgtaaaagaggagaaataacccacacaaccacatacaactaggaaatgatagatggatctgaaaaaaaaggatatgcactcttaacaagttcaacacccaagtactattgcaagtaccagctgtatttcatggaaaaaaaaaaaagaataactcaaaaggcagaacgaagagcctagaggtcagagatgagaggcatgaataattattcacaggcgttgaatataatcaaatgacttgcaacatttaccactgggattttaaaatgtggtggaccaatcattcttttagtctgtgcattttcccatttttttcaacaggaatgtctagagacattattcctgttttgccactgtatttttggtgaatgtgtagtaagtaactggcctctttagtatcacaaagctggatgaagaaaatgtggtacatatacaccatgaaatactatgccgccacaaaaaggaaatgagatcatgtcctctgcagggacatggatgaagctggaagccattatccttagcaaagtaacgcaggaacagaaaaccaaacaccacatgttgtctcttagaagtgggagctgaacgatgggctttgcagagattaaagcttcagaaaaaaatatgggaaaatatgttaaaatgttgacctgaaaatgaagtggatgactataaaactcttgagagaattagactttttgtagcagtttattacatgataataccttaaaggagatcacattcagtgacctgcgttgacagatgtgaatttcttcggagtaagaaatcctcagaggaaattacccagtatattcaaagctacaagggatttgttgacataacggtaatgtataacagcaatttttttctcaagtttttggattacctgtaagtgtctgactcagaagggcataggcattctttttatgtcatgggtttgatttctttcttcctttctcctttcattcccctggctcccatcttcaaagtgaaaaatatcacattcacttgctgacctagagcctttttctttttccagggctggcttctgacgggctctgcttgccttcctgatagtcttcccctttatgaatgaagccacttgccccagcttccctctgctgcccctatctgcaggcttgctaagatctcctgacctaggcgctgtcacccacagtgggctgcagagctggctcttcctagctggctaactatcctgaatcagtaaaaatttcctagtggagagtgatgggaaatcgaatccaaactggcttaaacaaaaatgagaatttattgattaacatgactcaggagaccagaactctatagagaacatggcctgacagtgggggaagagaggtgtttcctcaaaaagaaactgggtgcagctttcccagaagaatcagttgctcaatatataataccctgatgaatttagttaccattctatgtctcttacttcctcattcgtcaaagtacatctgtgatatttaaatgcaggtctgttttcaaggtcagtttccggaaacagtgaccctgagaaggcttcctcctgagtatgcataaacattcacagcttgcatgcgtgtgtgtgtgtgtgtgtgtgtgtgtgtgtatgtttgcttgcactgcataaaaacaattgcaacatcaacagaaataaaaattaaaggaataattctcctccgactctgccgttccatccagtgaaactcttcattctggggtaaagttccttcagttcttgttcatagataggtatatacttcataagtcaaacaatcaggctgggcgcagtagctcatgcctgtaatcccagccctttgggaggccgagctgggcagatcacttgagatcaggtgttcgagaccagcctcaagacctccaacatgggccgggtgcagtggctcacgtctgtaatcccagcactttgggaggccgagacggacggatgatgaggtcaggagatagagaccatcctggctaacatggtgaaaccccatctctactaaaaatacaaaaaaaaaaaaaaattagcccggcatggtggcaggcgcctgtggtcccagctactcgggaggctgaggcaggagaatggcgtgaacctgggaggcagagcttgtagtgagccaagtgccactgtgctccagcctggacgacagagcgagactctgtctcaaaaaaaaaaaaaaagaaaaaaaaaaaaaaaa

SEQ ID NO: 2147 - DNA, 10384 bp, Homo sapiens; identical to SEQ ID NO: 2043

SEQ ID NO: 2148 - DNA, 10531 bp, Homo sapiens; identical to SEQ ID NO: 2044

SEQ ID NO: 2149 - DNA, 8514 bp, Homo sapiens
atgctcagtggcttctcgacaagttggcagcaacaacacggccctggtcgtcgtcgccgctgcggtaacggagcggtttgggtggcggagcctgcgttcgcgccttcccactcccctcgccaccgcccgagcccaggttatcctgaatacatgtctaacaattttccttgcaacgttagctgttgtttttcactgtttccaaaggatcaaaattgcttcagaaattggagacatatttgatttaaaaggaaaaacttgaacaaatggacaatatgtctattacgaatacaccaacaagtaatgatgcctgtctgagcattgtgcatagtttgatgtgccatagacaaggtggagagagtgaaacatttgcaaaaagagcaattgaaagtttggtaaagaagctgaaggagaaaaaagatgaattggattctttaataacagctataactacaaatggagctcatcctagtaaatgtgttaccatacagagaacattggatgggaggcttcaggtggctggtcggaaaggatttcctcatgtgatctatgcccgtctctggaggtggcctgatcttcacaaaaatgaactaaaacatgttaaatattgtcagtatgcgtttgacttaaaatgtgatagtgtctgtgtgaatccatatcactacgaacgagttgtatcacctggaattgatctctcaggattaacactgcagagtaatgctccatcaagtatgatggtgaaggatgaatatgtgcatgactttgagggacagccatcgttgtccactgaaggacattcaattcaaaccatccagcatccaccaagtaatcgtgcatcgacagagacatacagcaccccagctctgttagccccatctgagtctaatgctaccagcactgccaactttcccaacattcctgtggcttccacaagtcagcctgccagtatactggggggcagccatagtgaaggactgttgcagatagcatcagggcctcagccaggacagcagcagaatggatttactggtcagccagctacttaccatcataacagcactaccacctggactggaagtaggactgcaccatacacacctaatttgcctcaccaccaaaacggccatcttcagcaccacccgcctatgccgccccatcccggacattactggcctgttcacaatgagcttgcattccagcctcccatttccaatcatcctgctcctgagtattggtgttccattgcttactttgaaatggatgttcaggtaggagagacatttaaggttccttcaagctgccctattgttactgttgatggatacgtggacccttctggaggagatcgcttttgtttgggtcaactctccaatgtccacaggacagaagccattgagagagcaaggttgcacataggcaaaggtgtgcagttggaatgtaaaggtgaaggtgatgtttgggtcaggtgccttagtgaccacgcggtctttgtacagagttactacttagacagagaagctgggcgtgcacctggagatgctgttcataagatctacccaagtgcatatataaaggtctttgatttgcgtcagtgtcatcgacagatgcagcagcaggcggctactgcacaagctgcagcagctgcccaggcagcagccgtggcaggaaacatccctggcccaggatcagtaggtggaatagctccagctatcagtctgtcagctgctgctggaattggtgttgatgaccttcgtcgcttatgcatactcaggatgagttttgtgaaaggctggggaccggattacccaagacagagcatcaaagaaacaccttgctggattgaaattcacttacaccgggccctccagctcctagacgaagtacttcataccatgccgattgcagacccacaacctttagactgaggtcttttaccgttggggcccttaaccttatcaggatggtggactacaaaatacaatcctgtttataatctgaagatatatttcacttttgttctgctttatcttttcataaagggttgaaaatgtgtttgctgccttgctcctagcagacagaaactggattaaaacaattttttttttcctcttcagaacttgtcaggcatggctcagagcttgaagattaggagaaacacattcttattaattcttcacctgttatgtatgaaggaatcattccagtgctagaaaatttagccctttaaaacgtcttagagccttttatctgcagaacatcgatatgtatatcattctacagaataatccagtattgctgattttaaaggcagagaagttctcaaagttaattcacctatgttattttgtgtacaagttgttattgttgaacatacttcaaaaataatgtgccatgtgggtgagttaattttaccaagagtaactttactctgtgtttaaaaagtaagttaataatgtattgtaatctttcatccaaaatattttttgcaagttatattagtgaagatggtttcaattcagattgtcttgcaacttcagttttatttttgccaaggcaaaaaactcttaatctgtgtgtatattgagaatcccttaaaattaccagacaaaaaaatttaaaattacgtttgttattcctagtggatgactgttgatgaagtatacttttcccctgttaaacagtagttgtattcttctgtatttctaggcacaaggttggttgctaagaagcctataagaggaatttcttttccttcattcatagggaaaggttttgtattttttaaaacactaaaagcagcgtcactctacctaatgtctcactgttctgcaaaggtggcaatgcttaaactaaataatgaataaactgaatattttggaaactgctaaattctatgttaaatactgtgcagaataatggaaacattacagttcataataggtagtttggatatttttgtacttgatttgatgtgactttttttggtataatgtttaaatcatgtatgttatgatattgtttaaaattcagtttttgtatcttggggcaagactgcaaacttttttatatcttttggttattctaagccctttgccatcaatgatcatatcaattggcagtgactttgtatagagaatttaagtagaaaagttgcagatgtattgactgtaccacagacacaatatgtatgctttttacctagctggtagcataaataaaactgaatctcaacatacaaagttgaattctaggtttgatttttaagattttttttttcttttgcacttttgagtccaatctcagtgatgaggtaccttctactaaatgacaggcaacagccagttctattgggcagctttgtttttttccctcacactctaccgggacttccccatggacattgtgtatcatgtgtagagttggttttttttttttttaatttttattttactatagcagaaatagacctgattatctacaagatgataaatagattgtctacaggataaatagtatgaaataaaatcaaggattatctttcagatgtgtttacttttgcctggagaacttttagctatagaaacacttgtgtgatgatagtcctccttatatcacctggaatgaacacagcttctactgccttgctcagaaggtcttttaaatagaccatcctagaaaccactgagtttgcttatttctgtgatttaaacatagatcttgatccaagctacatgacttttgtctttaaataacttatctaccacctcatttgtactcttgattacttacaaattctttcagtaaacacctaattttcttctgtaaaagtttggtgatttaagttttattggcagttttataaaaagacatcttctctagaaattgctaactttaggtccattttactgtgaatgaggaataggagtgagttttagaataacagatttttaaaaatccagatgatttgattaaaaccttaatcatacattgacataattcattgcttcttttttttgagatatggagtcttgctgtgttgcccaggcaggagtgcagtggtatgatctcagctcactgcaacctctgcctcccgggttcaactgattctcctgcctcagcctccctggtagctaggattacaggtgcccgccaccatgcctggctaacttttgtagttttagtagagacggggttttgcctgttggccaggctggtcttgaactcctgacctcaagtgatccatccaccttggcctcccaaagtgctgggattacgggcgtgagccactgtccctggcctcattgttcccttttctactttaaggaaagttttcatgtttaatcatctggggaaagtatgtgaaaaatatttgttaagaagtatctctttggagccaagccacctgtcttggtttctttctactaagagccataaagtatagaaatacttctagttgttaagtgcttatatttgtacctagatttagtcacacgcttttgagaaaacatctagtatgttatgatcagctattcctgagagcttggttgttaatctatatttctatttcttagtggtagtcatctttgatgaataagactaaagattctcacaggtttaaaattttatgtctactttaagggtaaaattatgaggttatggttctgggtgggttttctctagctaattcatatctcaaagagtctcaaaatgttgaatttcagtgcaagctgaatgagagatgagccatgtacacccaccgtaagacctcattccatgtttgtccagtgcctttcagtgcattatcaaagggaatccttcatggtgttgcctttattttccggggagtagatcgtgggatatagtctatctcatttttaatagtttaccgcccctggtatacaaagataatgacaataaatcactgccatataaccttgctttttccagaaacatggctgttttgtattgctgtaaccactaaataggttgcctataccattcctcctgtgaacagtgcagatttacaggttgcatggtctggcttaaggagagccatacttgagacatgtgagtaaactgaactcatattagctgtgctgcatttcagacttaaaatccatttttgtggggcagggtgtggtgtgtaaaggggggtgtttgtaatacaagttgaaggcaaaataaaatgtcctgtctcccagatgatatacatcttattatttttaaagtttattgctaattgtaggaaggtgagttgcaggtatctttgactatggtcatctggggaaggaaaattttacattttactattaatgctccttaagtgtctatggaggttaaagaataaaatggtaaatgtttctgtgcctggtttgatggtaactggttaatagttactcaccattttatgcagagtcacattagttcacaccctttctgagagccttttgggagaagcagttttattctctgagtggaacagagttctttttgttgataatttctagtttgctcccttcgttattgccaactttactggcattttatttaatgatagcagattgggaaaatggcaaatttaggttacggaggtaaatgagtatatgaaagcaattacctctaaagccagttaacaattattttgtaggtggggtacactcagcttaaagtaatgcatttttttttcccgtaaaggcagaatccatcttgttgcagatagctatctaaataatctcatatcctcttttgcaaagactacagagaataggctatgacaatcttgttcaagcctttccatttttttccctgataactaagtaatttctttgaacataccaagaagtatgtaaaaagtccatggccttattcatccacaaagtggcatcctaggcccagccttatccctagcagttgtcccagtgctgctaggttgcttatcttgtttatctggaatcactgtggagtgaaattttccacatcatccagaattgccttatttaagaagtaaaacgttttaatttttagcctttttttggtggagttatttaatatgtatatcagaggatatactagatggtaacatttctttctgtgcttggctatctttgtggacttcaggggcttctaaaacagacaggactgtgttgcctttactaaatggtctgagacagctatggttttgaatttttagttttttttttttaacccacttcccctcctggtctcttccctctctgataattaccattcatatgtgagtgttagtgtgcctccttttagcattttcttcttctctttctgattcttcatttctgactgcctaggcaaggaaaccagataaccaaacttactagaacgttctttaaaacacaagtacaaactctgggacaggacccaagacactttcctgtgaagtgctgaaaaagacctcattgtattggcatttgatatcagtttgatgtagcttagagtgcttcctgattcttgctgagtttcaggtagttgagatagagagaagtgagtcatattcatattttcccccttagaataatattttgaaaggtttcattgcttccacttgaatgctgctcttacaaaaactggggttacaagggttactaaattagcatcagtagccagaggcaataccgttgtctggaggacaccagcaaacaacacacaacaaagcaaaacaaaccttgggaaactaaggccatttgttttgttttggtgtcccctttgaagccctgccttctggccttactcctgtacagatatttttgacctataggtgcctttatgagaattgagggtctgacatcctgccccaaggagtagctaaagtaattgctagtgttttcagggattttaacatcagactggaatgaatgaatgaaactttttgtcctttttttttctgtttttttttttctaatgtagtaaggactaaggaaaacctttggtgaagacaatcatttctctctgttgatgtggatacttttcacaccgtttatttaaatgctttctcaataggtccagagccagtgttcttgttcaacctgaaagtaatggctctgggttgggccagacagttgcactctctagtttgccctctgccacaaatttgatgtgtgacctttgggcaagtcatttatcttctctgggccttagttgcctcatctgtaaaatgagggagttggagtagattaattattccagctctgaaattctaagtgaccttggctaccttgcagcagttttggatttcttccttatctttgttctgctgtttgagggggctttttacttatttccatgttattcaaaggagactaggcttgatattttattactgttcttttatggacaaaaggttacatagtatgcccttaagacttaattttaaccaaaggcctagcaccaccttaggggctgcaataaacacttaacgcgcgtgcgcacgcgcgcgcgcacacacacacacacacacacacacacacacaggtcagagtttaaggctttcgagtcatgacattctagcttttgaattgcgtgcacacacacacgcacgcacacactctggtcagagtttattaaggctttcgagtcatgacattatagcttttgagttggtgtgtgtgacaccaccctcctaagtggtgtgtgcttgtaattttttttttcagtgaaaatggattgaaaacctgttgttaatgcttagtgatattatgctcaaaacaaggaaattcccttgaaccgtgtcaattaaactggtttatatgactcaagaaaacaataccagtagatgattattaactttattcttggctctttttaggtccattttgattaagtgacttttggctggatcattcagagctctcttctagcctacccttggatgagtacaattaatgaaattcatattttcaaggacctgggagccttccttggggctgggttgagggtggggggttggggagtcctggtagaggccagctttgtggtagctggagaggaagggatgaaaccagctgctgttgcaaaggctgcttgtcattgatagaaggactcacgggcttggattgattaagactaaacatggagttggcaaactttcttcaagtattgagttctgttcaatgcattggacatgtgatttaagggaaaagtgtgaatgcttatagatgatgaaaacctggtgggctgcagagcccagtttagaagaagtgagttgggggttggggacagatttggtggtggtatttcccaactgtttcctcccctaaattcagaggaatgcagctatgccagaagccagagaagagccactcgtagcttctgctttggggacaactggtcagttgaaagtcccaggagttcctttgtggctttctgtatacttttgcctggttaaagtctgtggctaaaaaatagtcgaacctttcttgagaactctgtaacaaagtatgtttttgattaaaagagaaagccaactaaaaaaaaaaaaaaaaaaaa

SEQ ID NO: 2150 - DNA, 3126 bp, Homo sapiens
agcaacggggctggttcagggtctgaaacagagtttgggggttgtttgggattagtgaagctactgcctttgccgccagcgcagcctcagagtttgattatttgcaatgtcaggctttgaaaacttaaacacggatttctaccagacaagttacagcatcgatgatcagtcacagcagtcctatgattatggaggaagtggaggaccctatagcaaacagtatgctggctatgactattcgcagcaaggcagatttgtccctccagacatgatgcagccacaacagccatacaccgggcagatttaccagccaactcaggcatatactccagcttcacctcagcctttctatggaaacaactttgaggatgagccacctttattagaagagttaggtatcaattttgaccacatctggcaaaaaacactaacagtattacatccgttaaaagtagcagatggcagcatcatgaatgaaactgatttggcaggtccaatggttttttgccttgcttttggagccacattgctactggctggcaaaatccagtttggctatgtatacgggatcagtgcaattggatgtctaggaatgttttgtttattaaacttaatgagtatgacaggtgtttcatttggttgtgtggcaagtgtccttggatattgtcttctgcccatgatcctactttccagctttgcagtgatattttctttgcaaggaatggtaggaatcattctcactgctgggattattggatggtgtagtttttctgcttccaaaatatttatttctgcattagccatggaaggacagcaacttttagtagcatatccttgcgctttgttatatggagtctttgccctgatttccgtcttttgaaaatttatctgggatgtggacatcagtgggccagatgtacaaaaaggaccttgaactcttaaattggaccagcaaactgctgcagcgcaactctcatgcagatttacatttgactgttggagcaatgaaagtaaacgtgtatctcttgttcatttttatagaacttttgcatactatattggatttacctgcggtgtgactagctttaaatgtttgtgtttatacagataagaaatgctatttctttctggttcctgcagccattgaaaaacctttttccttgcaaattataatgtttttgatagatttttatcaactgtgggaaaccaaacacaaagctgataacctttcttaaaaacgacccagtcacagtaaagaagacacaagacggccgggcgtggtagctcacgcctgtaatcccagcactttgggaggccgaggcgggcggatcacaagggcaggagatcgagaccatcctggttaacacggtgaaaccccgactctactaaaactacaaaaaaaattagctgggcgtggtggcgggcgcctgtagtcccagctactcaggaggctgaggcaggagaagtgtgaacccaggaggcggagcttgcagtgagccgagatcacaccactgcactccatccagcctgggtgacagggtgagactctgtctcaaaaaaaaaaaaaaaaggagacacaagacttactgcaaaaatatttttccaaggatttaggaaagaaaaattgccttgtattctcaagtcaggtaactcaaagcaaaaaagtgatccaaatgtagagtatgagtttgcactccaaaaatttgacattactgtaaattatctcatggaatttttgctaaaattcagagatacgggaagttcacaatctaccttattgtagacatgaaatgcgaacacttacttacatattaatgttaactcaaccttagggacctggaatggttgcattaatgctataatcgttggatcgccacatttcccaaaaataataaaaaaatcactaaccttttttaaggaaaatatttaaagttttacaaaattcaatattgcaattatcaatgtaaagtacatttgaatgcttattaaaactttcccaattaattttaactgtgttattgaatttacttttactaaactactgttctctttgtctcttttttaactaggctctgattttgacccctaatttaagctttaagaatagaaatcagctaatatagaatcagacaaaaaggggattaaatgagcagtttgagttacattattttattgtattaaatttatttgatttatattgtcatgttctcttgccagagagaatctgtaggaaaatactgtatcttgtatactgatcattggctttttctagaaaaactgtctctgattctggacaaagctcagttatagttacgagaaagatatggtacagggaggaaaatactgccttttttttttttttaaagagattttcagactaaatagaaatgtcaaaatgatgtatcaatggttcttttttagaacaagttttcaaagcataaaaagaggttgagagaaataacatatttattgattcacataagtatgtttttcttcattaatcgtctggagaaacccacttgtcattaatttgttttgggctaggttttcaaacttaccaaattgctttaaaaaagcaatttggaaggtaatttgataggctttccaacttaaccaaattttttattgtaattcttggatagtatttttgtctttttcaattcatttgtctttttcagtatagtttttgttaaggcaaatgtcttcccttaatatccaaatattgctaataaacggtagaagatgctttggaaattaaaattatctcgctgttggttagacttaacactgttaatcttcagccaaatatcacatatggatcaaattattttcttttttgttgtttaccctatcctcaacaacatttttagtttaaattattgtagagattttttttgtggtggttattttttattttgctccaaaataataaggtgcaaagctattttatgcttaactgttgctctgtcaaaacagctatgcagtggagttgcatttgatgttctagagtttgattacatgcagagttgtatatagccaaaacttctcttatcaaactctgttatgtaggcatatttatatatacattaaagactgttgtactgtgtctcaaaaaaaaaaaaaaaa

SEQ ID NO: 2151 - DNA, 5703 bp, Homo sapiens
tttctgtactctgggtgactcagagagggaagagattcagccagcacactcctcgcgagcaagcattactctactgactggcagagacaggagaggtagatgtccacgcccacagaccctggtgcgatgccccacccagggccttcgccggggcctgggccttcccctgggccaattcttgggcctagtccaggaccaggaccatccccaggttccgtccacagcatgatggggccaagtcctggacctccaagtgtctcccatcctatgccgacgatggggtccacagacttcccacaggaaggcatgcatcaaatgcataagcccatcgatggtatacatgacaaggggattgtagaagacatccattgtggatccatgaagggcactggtatgcgaccacctcacccaggcatgggccctccccagagtccaatggatcaacacagccaaggttatatgtcaccacacccatctccattaggagccccagagcacgtctccagccctatgtctggaggaggcccaactccacctcagatgccaccaagccagccgggggccctcatcccaggtgatccgcaggccatgagccagcccaacagaggtccctcacctttcagtcctgtccagctgcatcagcttcgagctcagattttagcttataaaatgctggcccgaggccagcccctccccgaaacgctgcagcttgcagtccaggggaaaaggacgttgcctggcttgcagcaacaacagcagcagcaacagcagcagcagcagcagcagcagcagcagcagcagcagcaacagcagccgcagcagcagccgccgcaaccacagacgcagcaacaacagcagccggcccttgttaactacaacagaccatctggcccggggccggagctgagcggcccgagcaccccgcagaagctgccggtgcccgcgcccggcggccggccctcgcccgcgccccccgcagccgcgcagccgcccgcggccgcagtgcccgggccctcagtgccgcagccggccccggggcagccctcgcccgtcctccagctgcagcagaagcagagccgcatcagccccatccagaaaccgcaaggcctggaccccgtggaaattctgcaagagcgggaatacagacttcaggcccgcatagctcataggatacaagaactggaaaatctgcctggctctttgccaccagatttaagaaccaaagcaaccgtggaactaaaagcacttcggttactcaatttccagcgtcagctgagacaggaggtggtggcctgcatgcgcagggacacgaccctggagacggctctcaactccaaagcatacaaacggagcaagcgccagactctgagagaagctcgcatgaccgagaagctggagaagcagcagaagattgagcaggagaggaaacgccgtcagaaacaccaggaatacctgaacagtattttgcaacatgcaaaagattttaaggaatatcatcggtctgtggccggaaagatccagaagctctccaaagcagtggcaacttggcatgccaacactgaaagagagcagaagaaggagacagagcggattgaaaaggagagaatgcggcgactgatggctgaagatgaggagggttatagaaaactgattgatcaaaagaaagacaggcgtttagcttaccttttgcagcagaccgatgagtatgtagccaatctgaccaatctggtttgggagcacaagcaagcccaggcagccaaagagaagaagaagaggaggaggaggaagaagaaggctgaggagaatgcagagggtggggagtctgccctgggaccggatggagagcccatagatgagagcagccagatgagtgacctccctgtcaaagtgactcacacagaaaccggcaaggttctgttcggaccagaagcacccaaagcaagtcagctggacgcctggctggaaatgaatcctggttatgaagttgcccctagatctgacagtgaagagagtgattctgattatgaggaagaggatgaggaagaagagtccagtaggcaggaaaccgaagagaaaatactcctggatccaaatagcgaagaagtttctgagaaggatgctaagcagatcattgagacagctaagcaagacgtggatgatgaatacagcatgcagtacagtgccaggggctcccagtcctactacaccgtggctcatgccatctcggagagggtggagaaacagtctgccctcctaattaatgggaccctaaagcattaccagctccagggcctggaatggatggtttccctgtataataacaacttgaacggaatcttagccgatgaaatggggcttggaaagaccatacagaccattgcactcatcacttatctgatggagcacaaaagactcaatggcccctatctcatcattgttcccctttcgactctatctaactggacatatgaatttgacaaatgggctccttctgtggtgaagatttcttacaagggtactcctgccatgcgtcgctcccttgtcccccagctacggagtggcaaattcaatgtcctcttgactacttatgagtatattataaaagacaagcacattcttgcaaagattcggtggaaatacatgatagtggacgaaggccaccgaatgaagaatcaccactgcaagctgactcaggtcttgaacactcactatgtggcccccagaaggatcctcttgactgggaccccgctgcagaataagctccctgaactctgggccctcctcaacttcctcctcccaacaatttttaagagctgcagcacatttgaacaatggttcaatgctccatttgccatgactggtgaaagggtggacttaaatgaagaagaaactatattgatcatcaggcgtctacataaggtgttaagaccatttttactaaggagactgaagaaagaagttgaatcccagcttcccgaaaaagtggaatatgtgatcaagtgtgacatgtcagctctgcagaagattctgtatcgccatatgcaagccaaggggatccttctcacagatggttctgagaaagataagaaggggaaaggaggtgctaagacacttatgaacactattatgcagttgagaaaaatctgcaaccacccatatatgtttcagcacattgaggaatcctttgctgaacacctaggctattcaaatggggtcatcaatggggctgaactgtatcgggcctcagggaagtttgagctgcttgatcgtattctgccaaaattgagagcgactaatcaccgagtgctgcttttctgccagatgacatctctcatgaccatcatggaggattattttgcttttcggaacttcctttacctacgccttgatggcaccaccaagtctgaagatcgtgctgctttgctgaagaaattcaatgaacctggatcccagtatttcattttcttgctgagcacaagagctggtggcctgggcttaaatcttcaggcagctgatacagtggtcatctttgacagcgactggaatcctcatcaggatctgcaggcccaagaccgagctcaccgcatcgggcagcagaacgaggtccgggtactgaggctctgtaccgtgaacagcgtggaggaaaagatcctcgcggccgcaaaatacaagctgaacgtggatcagaaagtgatccaggcgggcatgtttgaccaaaagtcttcaagccacgagcggagggcattcctgcaggccatcttggagcatgaggaggaaaatgaggaagaagatgaagtaccggacgatgagactctgaaccaaatgattgctcgacgagaagaagaatttgacctttttatgcggatggacatggaccggcggagggaagatgcccggaacccgaaacggaagccccgtttaatggaggaggatgagctgccctcctggatcattaaggatgacgctgaagtagaaaggctcacctgtgaagaagaggaggagaaaatatttgggagggggtcccgccagcgccgtgacgtggactacagtgacgccctcacggagaagcagtggctaagggccatcgaagacggcaatttggaggaaatggaagaggaagtacggcttaagaagcgaaaaagacgaagaaatgtggataaagatcctgcaaaagaagatgtggaaaaagctaagaagagaagaggccgccctcccgctgagaaactgtcaccaaatccccccaaactgacaaagcagatgaacgctatcatcgatactgtgataaactacaaagatagttcagggcgacagctcagtgaagtcttcattcagttaccttcaaggaaagaattaccagaatactatgaattaattaggaagccagtggatttcaaaaaaataaaggaaaggattcgtaatcataagtaccggagcctaggcgacctggagaaggatgtcatgcttctctgtcacaacgctcagacgttcaacctggagggatcccagatctatgaagactccatcgtcttacagtcagtgtttaagagtgcccggcagaaaattgccaaagaggaagagagtgaggatgaaagcaatgaagaggaggaagaggaagatgaagaagagtcagagtccgaggcaaaatcagtcaaggtgaaaattaagctcaataaaaaagatgacaaaggccgggacaaagggaaaggcaagaaaaggccaaatcgaggaaaagccaaacctgtagtgagcgattttgacagcgatgaggagcaggatgaacgtgaacagtcagaaggaagtgggacggatgatgagtgatcagtatggacctttttccttggtagaactgaattccttcctcccctgtctcatttctacccagtgagttcatttgtcatataggcactgggttgtttctatatcatcatcgtctataaactagctttaggatagtgccagacaaacatatgatatcatggtgtaaaaaacacacacatacacaaatatttgtaacatattgtgaccaaatgggcctcaaagattcagattgaaacaaacaaaaagcttttgatggaaaatatgtgggtggatagtatatttctatgggtgggtctaatttggtaacggtttgattgtgcctggttttatcacctgttcagatgagaagatttttgtcttttgtagcactgataaccaggagaagccattaaaagccactggttattttatttttcatcaggcaattttcgaggtttttatttgttcggtattgtttttttacactgtggtacatataagcaactttaataggtgataaatgtacagtagttagatttcacctgcatatacatttttccattttatgctctatgatctgaacaaaagctttttgaattgtataagatttatgtctactgtaaacattgcttaatttttttgctcttgatttaaaaaaaagttttgttgaaagcgctattgaatattgcaatctatatagtgtattggatggcttcttttgtcaccctgatctcctatgttaccaatgtgtatcgtctccttctccctaaagtgtacttaatctttgctttctttgcacaatgtctttggttgcaagtcataagcctgaggcaaataaaattccagtaatttcgaagaatgtggtgttggtgctttcctaataaagaaataatttagcttgacaaa

SEQ ID NO: 2152 - DNA, 5758 bp, Homo sapiens
tttctgtactctgggtgactcagagagggaagagattcagccagcacactcctcgcgagcaagcattactctactgactggcagagacaggagaggtagatgtccacgcccacagaccctggtgcgatgccccacccagggccttcgccggggcctgggccttcccctgggccaattcttgggcctagtccaggaccaggaccatccccaggttccgtccacagcatgatggggccaagtcctggacctccaagtgtctcccatcctatgccgacgatggggtccacagacttcccacaggaaggcatgcatcaaatgcataagcccatcgatggtatacatgacaaggggattgtagaagacatccattgtggatccatgaagggcactggtatgcgaccacctcacccaggcatgggccctccccagagtccaatggatcaacacagccaaggttatatgtcaccacacccatctccattaggagccccagagcacgtctccagccctatgtctggaggaggcccaactccacctcagatgccaccaagccagccgggggccctcatcccaggtgatccgcaggccatgagccagcccaacagaggtccctcacctttcagtcctgtccagctgcatcagcttcgagctcagattttagcttataaaatgctggcccgaggccagcccctccccgaaacgctgcagcttgcagtccaggggaaaaggacgttgcctggcttgcagcaacaacagcagcagcaacagcagcagcagcagcagcagcagcagcagcagcagcagcaacagcagccgcagcagcagccgccgcaaccacagacgcagcaacaacagcagccggcccttgttaactacaacagaccatctggcccggggccggagctgagcggcccgagcaccccgcagaagctgccggtgcccgcgcccggcggccggccctcgcccgcgccccccgcagccgcgcagccgcccgcggccgcagtgcccgggccctcagtgccgcagccggccccggggcagccctcgcccgtcctccagctgcagcagaagcagagccgcatcagccccatccagaaaccgcaaggcctggaccccgtggaaattctgcaagagcgggaatacagacttcaggcccgcatagctcataggatacaagaactggaaaatctgcctggctctttgccaccagatttaagaaccaaagcaaccgtggaactaaaagcacttcggttactcaatttccagcgtcagctgagacaggaggtggtggcctgcatgcgcagggacacgaccctggagacggctctcaactccaaagcatacaaacggagcaagcgccagactctgagagaagctcgcatgaccgagaagctggagaagcagcagaagattgagcaggagaggaaacgccgtcagaaacaccaggaatacctgaacagtattttgcaacatgcaaaagattttaaggaatatcatcggtctgtggccggaaagatccagaagctctccaaagcagtggcaacttggcatgccaacactgaaagagagcagaagaaggagacagagcggattgaaaaggagagaatgcggcgactgatggctgaagatgaggagggttatagaaaactgattgatcaaaagaaagacaggcgtttagcttaccttttgcagcagaccgatgagtatgtagccaatctgaccaatctggtttgggagcacaagcaagcccaggcagccaaagagaagaagaagaggaggaggaggaagaagaaggctgaggagaatgcagagggtggggagtctgccctgggaccggatggagagcccatagatgagagcagccagatgagtgacctccctgtcaaagtgactcacacagaaaccggcaaggttctgttcggaccagaagcacccaaagcaagtcagctggacgcctggctggaaatgaatcctggttatgaagttgcccctagatctgacagtgaagagagtgattctgattatgaggaagaggatgaggaagaagagtccagtaggcaggaaaccgaagagaaaatactcctggatccaaatagcgaagaagtttctgagaaggatgctaagcagatcattgagacagctaagcaagacgtggatgatgaatacagcatgcagtacagtgccaggggctcccagtcctactacaccgtggctcatgccatctcggagagggtggagaaacagtctgccctcctaattaatgggaccctaaagcattaccagctccagggcctggaatggatggtttccctgtataataacaacttgaacggaatcttagccgatgaaatggggcttggaaagaccatacagaccattgcactcatcacttatctgatggagcacaaaagactcaatggcccctatctcatcattgttcccctttcgactctatctaactggacatatgaatttgacaaatgggctccttctgtggtgaagatttcttacaagggtactcctgccatgcgtcgctcccttgtcccccagctacggagtggcaaattcaatgtcctcttgactacttatgagtatattataaaagacaagcacattcttgcaaagattcggtggaaatacatgatagtggacgaaggccaccgaatgaagaatcaccactgcaagctgactcaggtcttgaacactcactatgtggcccccagaaggatcctcttgactgggaccccgctgcagaataagctccctgaactctgggccctcctcaacttcctcctcccaacaatttttaagagctgcagcacatttgaacaatggttcaatgctccatttgccatgactggtgaaagggtggacttaaatgaagaagaaactatattgatcatcaggcgtctacataaggtgttaagaccatttttactaaggagactgaagaaagaagttgaatcccagcttcccgaaaaagtggaatatgtgatcaagtgtgacatgtcagctctgcagaagattctgtatcgccatatgcaagccaaggggatccttctcacagatggttctgagaaagataagaaggggaaaggaggtgctaagacacttatgaacactattatgcagttgagaaaaatctgcaaccacccatatatgtttcagcacattgaggaatcctttgctgaacacctaggctattcaaatggggtcatcaatggggctgaactgtatcgggcctcagggaagtttgagctgcttgatcgtattctgccaaaattgagagcgactaatcaccgagtgctgcttttctgccagatgacatctctcatgaccatcatggaggattattttgcttttcggaacttcctttacctacgccttgatggcaccaccaagtctgaagatcgtgctgctttgctgaagaaattcaatgaacctggatcccagtatttcattttcttgctgagcacaagagctggtggcctgggcttaaatcttcaggcagctgatacagtggtcatctttgacagcgactggaatcctcatcaggatctgcaggcccaagaccgagctcaccgcatcgggcagcagaacgaggtccgggtactgaggctctgtaccgtgaacagcgtggaggaaaagatcctcgcggccgcaaaatacaagctgaacgtggatcagaaagtgatccaggcgggcatgtttgaccaaaagtcttcaagccacgagcggagggcattcctgcaggccatcttggagcatgaggaggaaaatgaggaagaagatgaagtaccggacgatgagactctgaaccaaatgattgctcgacgagaagaagaatttgacctttttatgcggatggacatggaccggcggagggaagatgcccggaacccgaaacggaagccccgtttaatggaggaggatgagctgccctcctggatcattaaggatgacgctgaagtagaaaggctcacctgtgaagaagaggaggagaaaatatttgggagggggtcccgccagcgccgtgacgtggactacagtgacgccctcacggagaagcagtggctaagggccatcgaagacggcaatttggaggaaatggaagaggaagtacggcttaagaagcgaaaaagacgaagaaatgtggataaagatcctgcaaaagaagatgtggaaaaagctaagaagagaagaggccgccctcccgctgagaaactgtcaccaaatccccccaaactgacaaagcagatgaacgctatcatcgatactgtgataaactacaaagataggtgtaacgtggagaaggtgcccagtaattctcagttggaaatagaaggaaacagttcagggcgacagctcagtgaagtcttcattcagttaccttcaaggaaagaattaccagaatactatgaattaattaggaagccagtggatttcaaaaaaataaaggaaaggattcgtaatcataagtaccggagcctaggcgacctggagaaggatgtcatgcttctctgtcacaacgctcagacgttcaacctggagggatcccagatctatgaagactccatcgtcttacagtcagtgtttaagagtgcccggcagaaaattgccaaagaggaagagagtgaggatgaaagcaatgaagaggaggaagaggaagatgaagaagagtcagagtccgaggcaaaatcagtcaaggtgaaaattaagctcaataaaaaagatgacaaaggccgggacaaagggaaaggcaagaaaaggccaaatcgaggaaaagccaaacctgtagtgagcgattttgacagcgatgaggagcaggatgaacgtgaacagtcagaaggaagtgggacggatgatgagtgatcagtatggacctttttccttggtagaactgaattccttcctcccctgtctcatttctacccagtgagttcatttgtcatataggcactgggttgtttctatatcatcatcgtctataaactagctttaggatagtgccagacaaacatatgatatcatggtgtaaaaaacacacacatacacaaatatttgtaacatattgtgaccaaatgggcctcaaagattcagattgaaacaaacaaaaagcttttgatggaaaatatgtgggtggatagtatatttctatgggtgggtctaatttggtaacggtttgattgtgcctggttttatcacctgttcagatgagaagatttttgtcttttgtagcactgataaccaggagaagccattaaaagccactggttattttatttttcatcaggcaattttcgaggtttttatttgttcggtattgtttttttacactgtggtacatataagcaactttaataggtgataaatgtacagtagttagatttcacctgcatatacatttttccattttatgctctatgatctgaacaaaagctttttgaattgtataagatttatgtctactgtaaacattgcttaatttttttgctcttgatttaaaaaaaagttttgttgaaagcgctattgaatattgcaatctatatagtgtattggatggcttcttttgtcaccctgatctcctatgttaccaatgtgtatcgtctccttctccctaaagtgtacttaatctttgctttctttgcacaatgtctttggttgcaagtcataagcctgaggcaaataaaattccagtaatttcgaagaatgtggtgttggtgctttcctaataaagaaataatttagcttgacaaaa

SEQ ID NO: 2153 - DNA, 2704 bp, Homo sapiens
gttgggcggggcagggagttcgtagccgcctctgggtaactcgactcgggcggccaaacctccggaggccggggacggaaggcgggcccgcagcagatcctggatccggaatctcccgggcaggagcggaatctgtcccgaaccgggtctgtgaggaactcgcgaacttggattaggaaatcccggagcccggatcgacaaatcccggaacccggaattaagatcgccaagtcccggatcgcggagcacagagcacggagtggactcgacgcggagcccggagtccggatcgcggcaccgcgggacgggacggagcgatgtcgggccgaggcgcgggcgggttcccgctgcccccgctaagccctggcggcggcgccgtggctgcggccctgggagcgccgcctccccccgcgggacccggcatgctgcccggaccggcgctccggggaccgggtccggcgcagtaccagcgacctggcatgtcaccagggaaccggatgcccatggctggcttgcaggtgggaccccctgctggctccccatttggtgcagcagctccgcttcgacctggcatgccacccaccatgatggatccattccgaaaacgcctgcttgtgccccaggcgcagcctcccatgcctgcccagcgccgggggttaaagaggaggaagatggcagataaggttctacctcagcgaatccgggagcttgttccagagtctcaggcgtacatggatctcttggcttttgagcggaagctggaccagaccattgctcgcaagcggatggagatccaggaggccatcaaaaagcctctgacacaaaagcgaaagcttcggatctacatttccaatacgttcagtcccagcaaggcggaaggcgatagtgcaggaactgcagggacccctgggggaaccccagcaggggacaaggtggcttcctgggaactccgagtggaaggaaaactgctggatgatcctagcaaacagaagaggaagttttcttcattctttaagagcctcgtcattgagctggacaaggagctgtacgggcctgacaatcacctggtggagtggcaccggatgcccaccacccaggagacagatggcttccaagtaaaacggcctggagacctcaacgtcaagtgcaccctcctgctcatgctggatcatcagcctccccagtacaaattggacccccgattggcaaggctgctgggagtgcacacgcagacgagggccgccatcatgcaggccctgtggctttacatcaagcacaaccagctgcaggatgggcacgagcgggagtacatcaactgcaaccgttacttccgccagatcttcagttgtggccgactccgtttctccgagattcccatgaagctggcagggttgctgcagcatccagaccccattgtcatcaaccatgtcattagtgtcgaccctaacgaccagaagaagacagcctgttacgacatcgatgtggaggtggacgacccactgaaggcccaaatgagcaattttctggcctctaccaccaatcagcaggagatcgcctcccttgatgtcaagatccatgagaccattgagtccatcaaccagctgaagacccagagagatttcatgctcagttttagcaccgacccccaggacttcatccaggaatggctccgttcccagcgccgagacctcaagatcatcactgatgtgattggaaatcctgaggaggagagacgagctgctttctaccaccagccctgggcccaggaagcagtaggcaggcacatctttgccaaggtgcagcagcgaaggcaggaactggaacaggtgctgggaattcgcctgacctaactgctcagggatctttcttcccagccctggagcctggagggagaccaccctctgggtccttgctggggccgcagacacgtaggctggggtgaggagtgtctgctgtcaccctctactctccagctttagttttataaatgtagtgataggattccttgttgcttggtccccaaagccttatactttttgcattggctttaattgggttcagcagatgcctcctctgcccccctgcaggcaggcccaagtaggactgctggaggctgtgctttgacattgtaagacatttccgaaccaaaggctgctgggtttgcatgtttacagactccccctggggcgagggtcagagctggctctggggagctgggctaggaagaggaggtgcagcccagactcttcctagcctttctaaaccaaagttctttgccattcctacaagcccagccttgctgctggttttttcctttcctttgggtatttgcactattttgggagcaagttttctatgtgggagccactttttttgtacaggggtaagttgggggttttcagggagcctgttaggtgcctccttcttttctttcctcaatctatgcaagcggctctggccgccatcatctcctgggatgccagagggctgcctctccagcggcttgggccggggaggggacactccagttctctagcatggcctgaggtatggggtatgtgcatgtggaggccagggtaaggtgaatggggaggctgggaggactggtgttgccctttggagcttggtgaggagggtgggcctagggcttggcgagtgccacatctggcaggtttggaaatttccaaataaatccttttgtcta

SEQ ID NO: 2154 - DNA, 5297 bp, Homo sapiens
caacaaactaagcagttgctcaatcgttgattgatcctcaggcacgtctagattttcccacttacataggtcttgttaagaaaccagtcctgccttcttgccactcgtgtctttcgatggctcccttcccgaagtcccgctgcctctaagcggagtgttaagcggggctctcggaagccggtggaccgagatttccccgggtggggcgggcgcggtgtagcggcccgcgggctgacttgctcccggctgtcccccggccccagcgaccatgccccgtaaaggcacccagccctccactgcccggcgcagagaggaagggccgccgccgccgtcccctgacggcgccagcagcgacgcggagcctgagccgccgtccggccgcacggagagcccagccaccgccgcagagactgcaagtgaggaacttgataatagaagtttagaagagattttgaacagcattcctcctcccccgcctccagcaatgaccaatgaagctggagctcctcggcttatgataactcatattgtaaaccagaacttcaaatcctatgctggggagaaaattctgggacctttccataagcgcttttcctgtattatcgggccaaatggcagtggcaaatccaatgttattgattctatgctttttgtgtttggctatcgagcacaaaaaataagatctaaaaaactctcagtattaatacataattctgatgaacacaaggacattcagagttgtacagtagaagttcattttcaaaagataattgataaggaaggggatgattatgaagtcattcctaacagtaatttctatgtatccagaacggcctgcagagataatacttctgtctatcacataagtggaaagaaaaagacatttaaggatgttggaaatcttcttcgaagccatggaattgacttggaccataatagatttttaattttacagggtgaagttgaacaaattgctatgatgaaaccaaaaggccagactgaacacgatgagggtatgcttgaatatttagaagatataattggttgtggacggctaaatgaacctattaaagtcttgtgtcggagagttgaaatattaaatgaacacagaggagagaagttaaacagggtaaagatggtggaaaaggaaaaggatgccttagaaggagagaaaaacatagctatcgaatttcttaccttggaaaatgaaatatttagaaaaaagaatcatgtttgtcaatattatatttatgagttgcagaaacgaattgctgaaatggaaactcaaaaggaaaaaattcatgaagataccaaagaaattaatgagaagagcaatatactatcaaatgaaatgaaagctaagaataaagatgtaaaagatacagaaaagaaactgaataaaattacaaaatttattgaggagaataaagaaaaatttacacagctagatttggaagatgttcaagttagagaaaagttaaaacatgccacgagtaaagccaaaaaactggagaaacaacttcaaaaagataaagaaaaggttgaagaatttaaaagtatacctgccaagagtaacaatatcattaatgaaacaacaaccagaaacaatgccctcgagaaggaaaaagagaaagaagaaaaaaaattaaaggaagttatggatagccttaaacaggaaacacaagggcttcagaaagaaaaagaaagtcgagagaaagaacttatgggtttcagcaaatcggtaaatgaagcacgttcaaagatggatgtagcccagtcagaacttgatatctatctcagtcgtcataatactgcagtgtctcaattaactaaggctaaggaagctctaattgcagcttctgagactctcaaagaaaggaaagctgcaatcagagatatagaaggaaaactccctcaaactgaacaagaattaaaggagaaagaaaaagaacttcaaaaacttacacaagaagaaacaaactttaaaagtttggttcatgatctctttcaaaaagttgaagaagcaaagagctcattagcaatgaatcgaagtagggggaaagtccttgatgcaataattcaagaaaaaaaatctggcaggattccaggaatatatggaagattgggggacttaggagccattgatgaaaaatacgacgtggctatatcatcctgttgtcatgcactggactacattgttgttgattctattgatatagcccaagaatgtgtaaacttccttaaaagacaaaatattggagttgcaacctttataggtttagataagatggctgtatgggcgaaaaagatgaccgaaattcaaactcctgaaaatactcctcgtttatttgatttagtaaaagtaaaagatgagaaaattcgccaagctttttattttgctttacgagataccttagtagctgacaacttggatcaagccacaagagtagcatatcaaaaagatagaagatggagagtggtaactttacagggacaaatcatagaacagtcaggtacaatgactggtggtggaagcaaagtaatgaaaggaagaatgggttcctcacttgttattgaaatctctgaagaagaggtaaacaaaatggaatcacagttgcaaaacgactctaaaaaagcaatgcaaatccaagaacagaaagtacaacttgaagaaagagtagttaagttacggcatagtgaacgagaaatgaggaacacactagaaaaatttactgcaagcatccagcgtttaatagagcaagaagaatatttgaatgtccaagttaaggaacttgaagctaatgtacttgctacagcccctgacaaaaaaaagcagaaattgctagaagaaaacgttagtgctttcaaaacagaatatgatgctgtggctgagaaagctggtaaagtagaagctgaggttaaacgcttacacaataccatcgtagaaatcaataatcataaactcaaggcccaacaagacaaacttgataaaataaataagcaattagatgaatgtgcttctgctattactaaagcccaagtagcaatcaagactgctgacagaaaccttcaaaaggcacaagactctgtcttgcgtacagagaaagaaataaaagatactgagaaagaggtggatgacctaacagcagagctgaaaagtcttgaggacaaagcagcagaggtcgtaaagaatacaaatgctgcagaggaatccttaccagagatccagaaagaacatcgcaatctgcttcaagaattaaaagttattcaagaaaatgaacatgctcttcaaaaagatgcacttagtattaagttgaaacttgaacaaatagatggtcacattgctgaacataattctaaaataaaatattggcacaaagagatttcaaaaatatcactgcatcctatagaagataatcctattgaagagatttcggttctaagcccagaggatcttgaagcgatcaagaatccagattctataacaaatcaaattgcacttttggaagcccggtgtcatgaaatgaaaccaaacctcggtgccatcgcagagtataaaaagaaggaagaattgtatttgcaacgggtagcagaattggacaaaattacttatgaaagagacagttttagacaggcatatgaagatcttcggaaacaaaggcttaatgaatttatggcaggtttttatataataacaaataaattaaaggaaaattaccaaatgcttactttgggaggggacgccgaactcgagcttgtagacagcttggatcctttctctgaaggaatcatgttcagtgttcgaccacctaagaaaagttggaaaaagatcttcaacctttcgggaggagagaaaacacttagttcattggctttagtatttgctcttcaccactacaagcccactcccctttacttcatggatgagattgatgcagcccttgattttaaaaatgtgtccattgttgcattttatatatatgaacaaacaaaaaatgcacagttcataataatttctcttcgaaataatatgtttgagatttcggatagacttattggaatttacaagacatacaacataacaaaaagtgttgctgtaaatccaaaagaaattgcatctaagggactttgttgaactttatgctgaagattcttcaagttgattcagtgtattactgatttttttctatttgtaaaggattatgagttgtataaaatacatactccctaaactagatcatgaaactggtttctgttttatgcagttgtcatttgtaaagtctaataaaatattctctataattgcttctagattacaaaaatatgacaatcttgtaagtagcagactatggagaaaaatgagttacctggagggtcaggtaacttgccaaactaaaaagtatgttagttgaggcaaagtcctaagcaaggttgtgctatcaaggctcagcataccttcgtgggcctttgatttaccaacactggaaatgcctgccaactaatcttggatagattctttaaggcattccacttagcttgccagttgagacaatcaccacagttattacccaaatactatgaacatatttttgtaaaccagtcattctgaattatagtgatgagaatttaaatatatgcttttctagaatttgatgtttgaccatttatgacttaattaccagagagccagtaaattaggacagtgtttcaacaagcctaggctatctcgtaagttgaaaaatatcccactatagttgcttcatgagtatgaagtaagatggcctctgatttacactggttcaatttacaaattttcaactttatgataggtttatccgggtactaaatgcatttcaacttgatagtttcaacttatgataggtttaccaggatgtagtcccactgttgaggagcatctatttaggggttaattactttagtaataagtggaaagtaagataccttgagtaatgtttgcctataaaattgtcagcgtatttttacactattggctcaagaatgttataatgctaagggacataagttggcaaccacttggtttttggaaggactttcggtattgtattagaagtctgccctagctgttaaatttctgggtatttatcctaaggaattaattaaagagttaattgttcctttcttcagtgggccattgttttagatatttaaaaaatccaacagtttctatcataatgtaactgtaaaaatgtaaacacattattagcatggacttttaaataaagatttaaagaaagcaaaaaaaaaaaaaaaaaaaa

SEQ ID NO: 2155 - DNA, 5071 bp, Homo sapiens
gtattttaggcgccattttcgagtgaaggacccggagccgaaacaccggtaggagcggggaggtgggtactacacaaccgtctccagccttggtctgagtggactgtcctgcagcgaccatgccccgtaaaggcacccagccctccactgcccggcgcagagaggaagggccgccgccgccgtcccctgacggcgccagcagcgacgcggagcctgagccgccgtccggccgcacggagagcccagccaccgccgcagcaatgaccaatgaagctggagctcctcggcttatgataactcatattgtaaaccagaacttcaaatcctatgctggggagaaaattctgggacctttccataagcgcttttcctgtattatcgggccaaatggcagtggcaaatccaatgttattgattctatgctttttgtgtttggctatcgagcacaaaaaataagatctaaaaaactctcagtattaatacataattctgatgaacacaaggacattcagagttgtacagtagaagttcattttcaaaagataattgataaggaaggggatgattatgaagtcattcctaacagtaatttctatgtatccagaacggcctgcagagataatacttctgtctatcacataagtggaaagaaaaagacatttaaggatgttggaaatcttcttcgaagccatggaattgacttggaccataatagatttttaattttacagggtgaagttgaacaaattgctatgatgaaaccaaaaggccagactgaacacgatgagggtatgcttgaatatttagaagatataattggttgtggacggctaaatgaacctattaaagtcttgtgtcggagagttgaaatattaaatgaacacagaggagagaagttaaacagggtaaagatggtggaaaaggaaaaggatgccttagaaggagagaaaaacatagctatcgaatttcttaccttggaaaatgaaatatttagaaaaaagaatcatgtttgtcaatattatatttatgagttgcagaaacgaattgctgaaatggaaactcaaaaggaaaaaattcatgaagataccaaagaaattaatgagaagagcaatatactatcaaatgaaatgaaagctaagaataaagatgtaaaagatacagaaaagaaactgaataaaattacaaaatttattgaggagaataaagaaaaatttacacagctagatttggaagatgttcaagttagagaaaagttaaaacatgccacgagtaaagccaaaaaactggagaaacaacttcaaaaagataaagaaaaggttgaagaatttaaaagtatacctgccaagagtaacaatatcattaatgaaacaacaaccagaaacaatgccctcgagaaggaaaaagagaaagaagaaaaaaaattaaaggaagttatggatagccttaaacaggaaacacaagggcttcagaaagaaaaagaaagtcgagagaaagaacttatgggtttcagcaaatcggtaaatgaagcacgttcaaagatggatgtagcccagtcagaacttgatatctatctcagtcgtcataatactgcagtgtctcaattaactaaggctaaggaagctctaattgcagcttctgagactctcaaagaaaggaaagctgcaatcagagatatagaaggaaaactccctcaaactgaacaagaattaaaggagaaagaaaaagaacttcaaaaacttacacaagaagaaacaaactttaaaagtttggttcatgatctctttcaaaaagttgaagaagcaaagagctcattagcaatgaatcgaagtagggggaaagtccttgatgcaataattcaagaaaaaaaatctggcaggattccaggaatatatggaagattgggggacttaggagccattgatgaaaaatacgacgtggctatatcatcctgttgtcatgcactggactacattgttgttgattctattgatatagcccaagaatgtgtaaacttccttaaaagacaaaatattggagttgcaacctttataggtttagataagatggctgtatgggcgaaaaagatgaccgaaattcaaactcctgaaaatactcctcgtttatttgatttagtaaaagtaaaagatgagaaaattcgccaagctttttattttgctttacgagataccttagtagctgacaacttggatcaagccacaagagtagcatatcaaaaagatagaagatggagagtggtaactttacagggacaaatcatagaacagtcaggtacaatgactggtggtggaagcaaagtaatgaaaggaagaatgggttcctcacttgttattgaaatctctgaagaagaggtaaacaaaatggaatcacagttgcaaaacgactctaaaaaagcaatgcaaatccaagaacagaaagtacaacttgaagaaagagtagttaagttacggcatagtgaacgagaaatgaggaacacactagaaaaatttactgcaagcatccagcgtttaatagagcaagaagaatatttgaatgtccaagttaaggaacttgaagctaatgtacttgctacagcccctgacaaaaaaaagcagaaattgctagaagaaaacgttagtgctttcaaaacagaatatgatgctgtggctgagaaagctggtaaagtagaagctgaggttaaacgcttacacaataccatcgtagaaatcaataatcataaactcaaggcccaacaagacaaacttgataaaataaataagcaattagatgaatgtgcttctgctattactaaagcccaagtagcaatcaagactgctgacagaccttcaaaaggcacaagactctgtcttgcgtacagagaaagaaataaaagatactgagaaagaggtggatgacctaacagcagagctgaaaagtcttgaggacaaagcagcagaggtcgtaaagaatacaaatgctgcagaggaatccttaccagagatccagaaagaacatcgcaatctgcttcaagaattaaaagttattcaagaaaatgaacatgctcttcaaaaagatgcacttagtattaagttgaaacttgaacaaatagatggtcacattgctgaacataattctaaaataaaatattggcacaaagagatttcaaaaatatcactgcatcctatagaagataatcctattgaagagatttcggttctaagcccagaggatcttgaagcgatcaagaatccagattctataacaaatcaaattgcacttttggaagcccggtgtcatgaaatgaaaccaaacctcggtgccatcgcagagtataaaaagaaggaagaattgtatttgcaacgggtagcagaattggacaaaattacttatgaaagagacagttttagacaggcatatgaagatcttcggaaacaaaggcttaatgaatttatggcaggtttttatataataacaaataaattaaaggaaaattaccaaatgcttactttgggaggggacgccgaactcgagcttgtagacagcttggatcctttctctgaaggaatcatgttcagtgttcgaccacctaagaaaagttggaaaaagatcttcaacctttcgggaggagagaaaacacttagttcattggctttagtatttgctcttcaccactacaagcccactcccctttacttcatggatgagattgatgcagcccttgattttaaaaatgtgtccattgttgcattttatatatatgaacaaacaaaaaatgcacagttcataataatttctcttcgaaataatatgtttgagatttcggatagacttattggaatttacaagacatacaacataacaaaaagtgttgctgtaaatccaaaagaaattgcatctaagggactttgttgaactttatgctgaagattcttcaagttgattcagtgtattactgatttttttctatttgtaaaggattatgagttgtataaaatacatactccctaaactagatcatgaaactggtttctgttttatgcagttgtcatttgtaaagtctaataaaatattctctataattgcttctagattacaaaaatatgacaatcttgtaagtagcagactatggagaaaaatgagttacctggagggtcaggtaacttgccaaactaaaaagtatgttagttgaggcaaagtcctaagcaaggttgtgctatcaaggctcagcataccttcgtgggcctttgatttaccaacactggaaatgcctgccaactaatcttggatagattctttaaggcattccacttagcttgccagttgagacaatcaccacagttattacccaaatactatgaacatatttttgtaaaccagtcattctgaattatagtgatgagaatttaaatatatgcttttctagaatttgatgtttgaccatttatgacttaattaccagagagccagtaaattaggacagtgtttcaacaagcctaggctatctcgtaagttgaaaaatatcccactatagttgcttcatgagtatgaagtaagatggcctctgatttacactggttcaatttacaaattttcaactttatgataggtttatccgggtactaaatgcatttcaacttgatagtttcaacttatgataggtttaccaggatgtagtcccactgttgaggagcatctatttaggggttaattactttagtaataagtggaaagtaagataccttgagtaatgtttgcctataaaattgtcagcgtatttttacactattggctcaagaatgttataatgctaagggacataagttggcaaccacttggtttttggaaggactttcggtattgtattagaagtctgccctagctgttaaatttctgggtatttatcctaaggaattaattaaagagttaattgttcctttcttcagtgggccattgttttagatatttaaaaaatccaacagtttctatcataatgtaactgtaaaaatgtaaacacattattagcatggacttttaaataaagatttaaagaaagcaaaaaaaaaaaaaaaaaaaa

SEQ ID NO: 2156 - DNA, 2570 bp, Homo sapiens
ggactcgagcgctccgattggagttagggcctgcttgtctgcgtgctgcgaagtccgcggctgcccccggggccctagtcgttgggttccagggtccttcacgttccattcccaggctggtctgagctccggggccgtggtcccgctgcctcctccggtcgtcgtgcggaagctgcgacgcaggcagaccatggcagagttctcccagaaacgggggaagcggcgtagcgacgaagggctgggcagcatggtggacttcctcctggccaatgcccgcctggtgctgggcgtgggcggggctgctgtgctgggcattgccaccctggccgtgaagcggttcattgacagggccactagcccgcgggatgaggatgacaccaaggcagacagctggaaggaactgagcctgctcaaggccacaccacacctgcagccccggcctccacctgctgcccttagccagccagtgttgcccttggccccctcgtcgtctgccccagaagggcctgcagaaactgatcctgaggtgacaccacagctcagctccccagcaccgctgtgtctgacactgcaggagaggctgctggccttcgagcgggaccgtgtgaccatcccagcagcccaggtggctttggccaaacagctggctggcgacatcgccctggagctgcaggcctactttcggagcaagttcccggaactgccctttggggcattcgtgcctggggggccgctctacgacgggctgcaggcgggggctgcggaccatgtgcgtctcctggtgccactggtgctggagccgggcctgtggagcctggtgccgggcgtggacactgtggcgagggaccctcgctgctgggccgtgcgcaggacgcagcttgagttctgcccccgtgggagcagcccctgggaccgcttcctggtcgggggctacctctcctcccgcgtcctgctggagctactccgcaaggcgctggctgcttctgtcaactggccggccattggcagccttctcgggtgcctgatccggcccagcatggcctcggaggagctgctgctcgaggtgcagcacgaacgcctggagctcactgtggctgtgcttgtggcagtccctggggtcgatgctgacgaccgcctcctcttggcctggcccctggaggggctggcggggaacctctggctgcaggacctgtatccagtggaggctgctaggctgcgagccctggacgaccatgacgctgggactcgccggcggctgctgctgctgctgtgtgctgtctgccgtggttgctcggctctggggcagctaggccggggtcacctgacccaggtggtcctgcgtctgggggaggacaacgtggattggacggaggaggccttgggtgagcgcttcctgcaagccctggagctgctcatcggcagcctggagcaggccagcctgccctgccacttcaaccccagcgtgaacctcttcagcagcttgcgtgaggaggagattgacgacattggctatgcgctatacagtggcctacaggagcccgaggggctgctctaggtgggtggaaacgggtggttgccatgttttctaatgctggggagctgcacccacctcccttccagggatttgaatagtggtttttctctagctttttgccagaacaaaggagggtacattacttaaacccagggcatcaggatgtgcttgggctatggtggccataaaccctgagcccagagagcttgggtcactgtcacctgagtgcagctgggctgcctcaggcagcttggagtgccagccattcctgcaagcaccgtttcagctcttggggccaaccccaggacctttggctctgtccatcaccagcaaccaatccaccaacagaatgtggtttctgccatcctgggcagaagctgaaggccagcttcacatttctgctgagagaaggtgacttaacgccttttccggccctagctccaggcgttttgaggcgtctggtgcctgatggtaggtatggtgtgtttgttctgtcccccaggggctggagtcacctggtgcccctgaaggacagatttttggctgttaaaggatggcattttcctgctgtcttctgtgcgtttagttttcttgctgagcgggagctcagtatgacttgccacccacctgatacctcagggcaaggccctttttccctccagccaggtgagtgttttcttcaggcagctgagggtcctgggggagctgaggctctgtgctgcacccccagcccacagctggggcatctcactggagctgttccaggccccactggagagcagaggacctgatcccccactagagaggtccggtgtgcacagccggcctcccagtgtgccaaaatgaactgctctcagctgatggctgtattctgactttgaagcctgttaagaggtagcaagggggctagaggagggagattccacctcccctcccaagtgaccctcctcctgcctctggtatccttccttttgaaacgaagctcagcttcgaagatgtgaacaagaataaaaggaaaaaattctaatgtatatat

SEQ ID NO: 2157 - DNA, 2458 bp, Homo sapiens
ctgaggcctgcgcgaccccgccagagatggggctgagtcccaatttagacaggcagaccatggcagagttctcccagaaacgggggaagcggcgtagcgacgaagggctgggcagcatggtggacttcctcctggccaatgcccgcctggtgctgggcgtgggcggggctgctgtgctgggcattgccaccctggccgtgaagcggttcattgacagggccactagcccgcgggatgaggatgacaccaaggcagacagctggaaggaactgagcctgctcaaggccacaccacacctgcagccccggcctccacctgctgcccttagccagccagtgttgcccttggccccctcgtcgtctgccccagaagggcctgcagaaactgatcctgaggtgacaccacagctcagctccccagcaccgctgtgtctgacactgcaggagaggctgctggccttcgagcgggaccgtgtgaccatcccagcagcccaggtggctttggccaaacagctggctggcgacatcgccctggagctgcaggcctactttcggagcaagttcccggaactgccctttggggcattcgtgcctggggggccgctctacgacgggctgcaggcgggggctgcggaccatgtgcgtctcctggtgccactggtgctggagccgggcctgtggagcctggtgccgggcgtggacactgtggcgagggaccctcgctgctgggccgtgcgcaggacgcagcttgagttctgcccccgtgggagcagcccctgggaccgcttcctggtcgggggctacctctcctcccgcgtcctgctggagctactccgcaaggcgctggctgcttctgtcaactggccggccattggcagccttctcgggtgcctgatccggcccagcatggcctcggaggagctgctgctcgaggtgcagcacgaacgcctggagctcactgtggctgtgcttgtggcagtccctggggtcgatgctgacgaccgcctcctcttggcctggcccctggaggggctggcggggaacctctggctgcaggacctgtatccagtggaggctgctaggctgcgagccctggacgaccatgacgctgggactcgccggcggctgctgctgctgctgtgtgctgtctgccgtggttgctcggctctggggcagctaggccggggtcacctgacccaggtggtcctgcgtctgggggaggacaacgtggattggacggaggaggccttgggtgagcgcttcctgcaagccctggagctgctcatcggcagcctggagcaggccagcctgccctgccacttcaaccccagcgtgaacctcttcagcagcttgcgtgaggaggagattgacgacattggctatgcgctatacagtggcctacaggagcccgaggggctgctctaggtgggtggaaacgggtggttgccatgttttctaatgctggggagctgcacccacctcccttccagggatttgaatagtggtttttctctagctttttgccagaacaaaggagggtacattacttaaacccagggcatcaggatgtgcttgggctatggtggccataaaccctgagcccagagagcttgggtcactgtcacctgagtgcagctgggctgcctcaggcagcttggagtgccagccattcctgcaagcaccgtttcagctcttggggccaaccccaggacctttggctctgtccatcaccagcaaccaatccaccaacagaatgtggtttctgccatcctgggcagaagctgaaggccagcttcacatttctgctgagagaaggtgacttaacgccttttccggccctagctccaggcgttttgaggcgtctggtgcctgatggtaggtatggtgtgtttgttctgtcccccaggggctggagtcacctggtgcccctgaaggacagatttttggctgttaaaggatggcattttcctgctgtcttctgtgcgtttagttttcttgctgagcgggagctcagtatgacttgccacccacctgatacctcagggcaaggccctttttccctccagccaggtgagtgttttcttcaggcagctgagggtcctgggggagctgaggctctgtgctgcacccccagcccacagctggggcatctcactggagctgttccaggccccactggagagcagaggacctgatcccccactagagaggtccggtgtgcacagccggcctcccagtgtgccaaaatgaactgctctcagctgatggctgtattctgactttgaagcctgttaagaggtagcaagggggctagaggagggagattccacctcccctcccaagtgaccctcctcctgcctctggtatccttccttttgaaacgaagctcagcttcgaagatgtgaacaagaataaaaggaaaaaattctaatgtatatataaaaaaaaaaaaaaaaaaa

SEQ ID NO: 2158 - DNA, 1473 bp, Homo sapiens
ccacaaatgtgggagggcgataaccactcgtagaaagcgtgagaagttactacaagcggtcctcccggccaccgtactgttccgctcccagaagccccgggcggcggaagtcgtcactcttaagaagggacggggccccacgctgcgcacccgcgggtttgctatggcgatgagcagcggcggcagtggtggcggcgtcccggagcaggaggattccgtgctgttccggcgcggcacaggccagagcgatgattctgacatttgggatgatacagcactgataaaagcatatgataaagctgtggcttcatttaagcatgctctaaagaatggtgacatttgtgaaacttcgggtaaaccaaaaaccacacctaaaagaaaacctgctaagaagaataaaagccaaaagaagaatactgcagcttccttacaacagtggaaagttggggacaaatgttctgccatttggtcagaagacggttgcatttacccagctaccattgcttcaattgattttaagagagaaacctgtgttgtggtttacactggatatggaaatagagaggagcaaaatctgtccgatctactttccccaatctgtgaagtagctaataatatagaacagaatgctcaagagaatgaaaatgaaagccaagtttcaacagatgaaagtgagaactccaggtctcctggaaataaatcagataacatcaagcccaaatctgctccatggaactcttttctccctccaccaccccccatgccagggccaagactgggaccaggaaagataattcccccaccacctcccatatgtccagattctcttgatgatgctgatgctttgggaagtatgttaatttcatggtacatgagtggctatcatactggctattatatggaaatgctggcatagagcagcactaaatgacaccactaaagaaacgatcagacagatctggaatgtgaagcgttatagaagataactggcctcatttcttcaaaatatcaagtgttgggaaagaaaaaaggaagtggaatgggtaactcttcttgattaaaagttatgtaataaccaaatgcaatgtgaaatattttactggactcttttgaaaaaccatctgtaaaagactgaggtgggggtgggaggccagcacggtggtgaggcagttgagaaaatttgaatgtggattagattttgaatgatattggataattattggtaattttatggcctgtgagaagggtgttgtagtttataaaagactgtcttaatttgcatacttaagcatttaggaatgaagtgttagagtgtcttaaaatgtttcaaatggtttaacaaaatgtatgtgaggcgtatgtggcaaaatgttacagaatctaactggtggacatggctgttcattgtactgtttttttctatcttctatatgtttaaaagtatataataaaaatatttaatttttttttaaa

SEQ ID NO: 2159 - DNA, 1569 bp, Homo sapiens
ccacaaatgtgggagggcgataaccactcgtagaaagcgtgagaagttactacaagcggtcctcccggccaccgtactgttccgctcccagaagccccgggcggcggaagtcgtcactcttaagaagggacggggccccacgctgcgcacccgcgggtttgctatggcgatgagcagcggcggcagtggtggcggcgtcccggagcaggaggattccgtgctgttccggcgcggcacaggccagagcgatgattctgacatttgggatgatacagcactgataaaagcatatgataaagctgtggcttcatttaagcatgctctaaagaatggtgacatttgtgaaacttcgggtaaaccaaaaaccacacctaaaagaaaacctgctaagaagaataaaagccaaaagaagaatactgcagcttccttacaacagtggaaagttggggacaaatgttctgccatttggtcagaagacggttgcatttacccagctaccattgcttcaattgattttaagagagaaacctgtgttgtggtttacactggatatggaaatagagaggagcaaaatctgtccgatctactttccccaatctgtgaagtagctaataatatagaacagaatgctcaagagaatgaaaatgaaagccaagtttcaacagatgaaagtgagaactccaggtctcctggaaataaatcagataacatcaagcccaaatctgctccatggaactcttttctccctccaccaccccccatgccagggccaagactgggaccaggaaagccaggtctaaaattcaatggcccaccaccgccaccgccaccaccaccaccccacttactatcatgctggctgcctccatttccttctggaccaccaataattcccccaccacctcccatatgtccagattctcttgatgatgctgatgctttgggaagtatgttaatttcatggtacatgagtggctatcatactggctattatatggaaatgctggcatagagcagcactaaatgacaccactaaagaaacgatcagacagatctggaatgtgaagcgttatagaagataactggcctcatttcttcaaaatatcaagtgttgggaaagaaaaaaggaagtggaatgggtaactcttcttgattaaaagttatgtaataaccaaatgcaatgtgaaatattttactggactcttttgaaaaaccatctgtaaaagactgaggtgggggtgggaggccagcacggtggtgaggcagttgagaaaatttgaatgtggattagattttgaatgatattggataattattggtaattttatggcctgtgagaagggtgttgtagtttataaaagactgtcttaatttgcatacttaagcatttaggaatgaagtgttagagtgtcttaaaatgtttcaaatggtttaacaaaatgtatgtgaggcgtatgtggcaaaatgttacagaatctaactggtggacatggctgttcattgtactgtttttttctatcttctatatgtttaaaagtatataataaaaatatttaatttttttttaaa

SEQ ID NO: 2160 - DNA, 2721 bp, Homo sapiens
agtctccgcgctgctgaggcgcgcccggccgctcccacggcctcccctccgccctgcggtcccgccgcctccggggcctcctgggaccctggccctcgccgggcaggacgccgccagcgctgaaggcgcagcccggaggccgcgcggatgcagatctgtggatccagcgtagcatctgtagcagctgggacatcattccaggttttgggcccggtgtgttggcaacaactggatctgaagatggcagtcagggtgctttggggtggtctcagcctgctccgagtgctgtggtgtctccttccgcagacgggctatgtgcacccagatgagttcttccagtcccctgaggtgatggcagaggacatcctgggcgttcaggccgcgcggccctgggagttttaccccagcagctcctgccgctcggtgctcttccccctgctgatctctggttccaccttctggctgctcaggctctgggaggagctggggccgtggcctggcctggtgagcggctatgcgctgctggtggggcctcgactcctcctcactgccctttcctttgctctggacggggccgtgtaccacctggccccgccgatgggggcggatcgctggaacgccctggccctgctgtctggttcctacgtcaccctggtcttctacacaaggaccttctccaacaccattgagggactcctcttcacgtggctgctggtgctggtatcctcccatgtaacgtggggccctacacgcaaggagccggcgccgggtccacggtggcgcagctggcttcttggaggcattgtggctgctggcttcttcaaccggcccacctttctggcctttgctgtggtccccctctacctctggggcactcgtggagccacaaaccctggtttgaagtctctgacccgggaggccctggtgctgctccctggggcagccctcacagcagcggtgtttgtggccacggacagctggtatttctccagccccgctacatccaggaaccttgtcctgacacctgtcaacttcttgcactacaacctgaatccccaaaacctggcgagacatggcacgcacgcgcggctcactcacctggcagtcaacggcttcctgctcttcggggtgctgcatgcccaggccctgcaggctgcgtggcaacggctgcaagtcggcctccaggcctctgcacaaatgggcctcctgagggcactgggtgcccggagcctgctgtccagccccaggtcctatctccttctcctctacttcatgcctctggccctgctatctgcctttagccaccaggaggctcggttcctgattcccctcctggtccccctggtcctgctttgtagtccacagacgcagcctgtgccttggaagggcactgtggtcctcttcaacgccctcggtgccctcctcttcggctgcctgcatcaggggggcctggtgcctggcctggagtacctggagcaggtggtccatgcccctgtgctcccaagcacacccacccactacacactcctcttcactcacacctacatgcccccccggcacctcctacacctcccaggcctgggggcaccagtggaggtggtggacatgggggggactgaggactgggccctgtgccaaaccctgaaaagcttcaccagacaaccagcctgccaagtggctggtgggccatggctctgccgcctctttgtggtaacccctggcaccaccaggcgtgccgtggagaagtgcagcttccccttcaagaatgaaacacttttatttccccatctgaccctggaggatccaccagccctgtcctccttgctgagtggggcttggagggaccacctcagtcttcacattgtggagctgggggaagaaacctgacaatatgacagagcacccactgcccaagactcagccatagaagatgccgccccaccttctacttgggtagctgggctgggacgctgggacaggaccccgtcctccttcatgactcccactgctgcctctcctgggcatggctgttagctgttctgccttctgggtgagctggcactcttctccctgagaccaaagatttgacctgtcggtcttgatgtcaaggtccccaaagaccaggttaagtgacgacacctgtctgttcctgccctgttgcttccagccactgtgatgtttgaaatatgtgatagtacctggttgtgaaaaaagacaatgaactgctagtgacattcctcaatgacctctcccaaacctcccatgatgccttacccttgctgtcatgacaaccctctggcttcctaagacccatctgcctatcgaaatatgtgcaagtcagtgagacgaagtatagagaacaggtggcccagatccaggggacccaacttctggccccttggtctgtcacctcctcgctgtgtgatcttgagaaagctccttccactcacccaccccacttcccagtctgttgggatcagaggaactttgaggtgtctgccggctaacattgtgtcattcctggagtccacagtacacgtcccctgcctcaacaggcacagctctcacaaagctcttcaagcatggaagtgggagttgtgttgtacttcatggcactctgatgcctgctgtctcagtgtttggttattatgcaaacaagtaatgtttgaaatatataatagcactggagattttctccctaaaaaaaaaaaaaaaaaaaaa

SEQ ID NO: 2161 - DNA, 7091 bp, Homo sapiens
cgccgacccaagcggaagtgacgttaggtgtccgccggaggtgtcgttggtgtgttgcgcgactggccttgagggagagctggggcctgctcccggagagatacggctatgtcgatcgaaatcgaatcttcggatgtgatccgccttattatgcagtacttgaaggagaacagtttacatcgggcgttagccaccttgcaggaggagactactgtgtctctgaatactgtggacagcattgagagttttgtggctgacattaacagtggccattgggatactgtgttgcaggctatacagtctctgaaattgccagacaaaaccctcattgacctctatgaacaggttgttctggaattgatagagctccgtgaattgggtgctgccaggtcacttttgagacagactgatcccatgatcatgttaaaacaaacacagccagagcgatatattcatctggagaaccttttggccaggtcttactttgatcctcgtgaggcatacccagatggaagtagcaaagaaaagagaagagcagcaattgcccaggccttagctggcgaagtcagtgtggtgcctccatctcgtctcatggcattgctgggacaggcactgaagtggcagcagcatcagggattgcttcctcctggtatgaccatagatttgtttcgaggcaaggcagctgtcaaagatgtggaagaagaaaagtttcctacacaactgagcaggcatattaagtttggtcagaaatcacatgtggagtgtgctcgattttctccagatggtcagtatttggtcactgggtctgttgatggattcattgaagtatggaactttactactggaaaaatcagaaaggatcttaagtaccaggcccaagataactttatgatgatggatgatgctgtcctctgcatgtgtttcagcagagatacagaaatgttagcaactggggcccaagatggaaaaatcaaggtgtggaagattcagagtggacaatgtttaaggagatttgagagggcacacagtaagggtgtcacctgtctaagcttttctaaggatagcagtcagatccttagtgcttcttttgaccagacaattagaattcatggtttaaaatctgggaaaaccctgaaggaatttcgtggccattcctcctttgttaacgaagcaacatttacacaagatggacattacattattagtgcatcctctgatggcactgtaaagatctggaatatgaagaccacagaatgttcaaatacctttaaatccctgggcagcaccgcagggacagatattaccgtcaacagtgtgattctacttcctaaaaaccctgagcactttgtggtgtgcaacagatcaaacacggtggtcatcatgaacatgcaggggcagattgtcagaagcttcagttctggtaaaagagaaggtggggactttgtttgctgtgccctctctccccgtggtgaatggatctactgtgtaggggaggactttgtgctctactgtttcagtacagtcactggcaaactggagagaactttgacagtgcacgagaaggatgtgattggtattgcacatcaccctcatcagaacctgattgctacctacagtgaagatggactcctaaagctctggaaaccataattcaacttttctttttaaatcagctcgaaagcatgtacttaaatgaagcatattcatgtaatgtgcttttttttttttttgccagcttttctaagcaaatagattgtctgaattagtcacagaataattttgtgaaaattcatgtttaagtagcaactaccctttctttttttatatatttttaaggtattagtttatcttcttctaactggtgcagtcacttaatgttttcattaatcttcgacctggagagtgaaatactgatatttctagaaaaaaattctactcctctgattatttgaaatgctgaggaaaatgtccctcccatagtaaaacttgtaaataaggaactatatcatattcagtagctgtgttctgttccatctttttttttttttttgagatggagttttgcttgttgcccaggctggagtgcagcggcacgatcttggttcactgcaacctccgcctcccaggttcaagcgattctcttgcctcagcctcccgagtagctggggactacaggtgtgcgacaccatgcctggctaatttttttgtatttttagtagagatggggtttcaccatgttggccaggctggtctcaaactcctgacctcaaaggatccacccgccttggcctcccaaagtgctgggatcacaggcgtgagccaccatgcccggcccatctttttttttttttttttttttaaagatgttaataaactttatacctttctggagactttgttctaaaatgtacataaatgctcatctagttaacatatttacttagaatgtgggaggaggagtcacattattatccctgaatctcaagtacagcagaagtgaattcctgggatagtaggatagactaacatgtaaaaaggccaggtgatgcataggttctcatttcactgccctcagccttcctctccttctgagctgtgccttctcacatgttcagtcaactccagggaatattgtctccatcttctggatagaactagttgcaggatccgttacaagaattcagagttttggcatctcccctttgtatgttgtaggagaaggtttggcattgaaaatgtgctgttgttccaaagaaaaattagcaaaggacttgagatttagaaaagtctcctttgtaatgtgcatcattaccagttatctaaagaaaaacatgtaaaagccaacaaaacccttgaaaatattttgcatatggatgtctgtttcacgtttcaactgaagatgtatagagcacctctgatgatgaggaagataccatgctaggcagtactttcaagaacgtgagttcttatttctgcaggccttttgtgcccccttttaaatgttagcatttattaggtacaaactagtggggaaggtttttttaaaaagttttgcagtcttgtaatttacctttttaaaaaatttattttatttttctgagatggagtcttgctctgttgcccaggctggagtgcagtggtgccatctcagctaactgcaacttccacttcccaggttcaagcgattctcctgccttagcctcccaagtagctgggactacaggcgcatgccagcatgcctggctaatttttgtatttttagtagagcgggggttttgccatgttggccaggctggtcttgaactcctgacctcaggtgatccgcctgccctggcctcccaaagtgctgggattacaggcatgagccactgcgcccagccttgtaatttacctttgatggtgacctgaaatgcagtatgatcctatatgtggcacgtagtaatgttcagtgtttgctgaattaattctgggcagcactaagaaatccctctttcccagtcatattctataacacatttcccatttgccacaaaacctgcagctttttggtccaggtaatgacatttgctgccattttgatgatttaaaaatggtcgtgggagttgaacatagtcatgaattcaggattcctgagcatgtagacagtcatcccagtggaaagacacgttcacttaagagaagtttaagttagaggaaacagtttatgctaaaaaaatttttagaaaagtccttgagaatttttgatttagtcttgacctcatgaagctggtagttatgatgtgcatagtttgtatcaccgtttatgaagatggagaatctagtcagcacgtgttggtttattctaggaatttttagggaacacttctgttgctggcaccaggtgatgaatatggttaaaaaaagactcgtttctgcctaaacatagggaagaagagcaaattaaaaggagtaattaaaactgataaaagctcaagttacctttgtgatgatgaggcgggcagttaacgcgaaagggttgggaaaggcttcctggagggactagggggcggtctaagcacagggaacctaaccggggactccagtgtggcacagcggcaaggtatgtgctgggcaaaatgataggtgtcttgggagaccaggcaaagagagctggattaggagccgttaagtatatatttttcttctttttaaataaaataatgcactgggtgaacatgtaaacgctaagttgaaaatctgcctttcccaggtaacccttgttaatctttctacaacttcatttcgtacaaacctgaaaaacacactgattttgtctttaaatgggcacacgctgcttacactcctcggcgcctagcctttctgaagccccacgcggccgtccctccagcattgaaggctggggcagcccagctcccctccagcgcccttacagccagaccgcggcggggtcgggccgcgcacgcgcagggcggacggccggatctggggcgccgctgctccgggtggtcggaggtaggagtcccatcttgggtccagggccggtagagccccttaccgggggtagggagactgcgcacccgctagagccaactgtcagggcctgcagacgtcgggtgacgtcactgttacaaaattggcggtcacatcgtcttaagggccggtggcagcggctgcgcgaacgggagttggctgccgggaatcagtgctcacttccttctgaattgggcgtgtgcagtcggttcctagggaagtgctctgctgcagccaccagatttaacggatgctgctctctagcacttaacatagaagctaaactacctggcgttaaaattaattccatgagcataaggacatttgtcctatcccctattctgctgttgaattaatgactggaaaacattgcgcggaggtatttgggagtagtatggctttttttttttttttttttttaacagcaaatggtataaatctcaggtacaattcagtatcttcttcaccagttgttttttttcagcatgtattattactaccactaacggcctctgttgagcccttccttgctatgtaagcagccatatttaattctcagaacaatgtaatgagggtgcgcaaatgcacatgaagaaacaggtttccagacgtgaggcacctaactcagtccaacttgcacgaagctcgcattgaaaaccagatgtgactccgaagctaggttttttttctctcttgcctcactctcaatattgctgtcagttcctcctcaatctttaggtttgggcagggacaaagaatacatggattgttcctccacatgctgcaaacacattcacctaagcagagcacaggtagtgagatgagtagagagaactgaattagaggattctggatgtcagtctttgctgtcacttcttttggcttgtgctagaacagtggttcttacaagtgtcacgtgatagacacattctaaggtcctatcccagacctacagaatcagaaattggtggtggggcccagcaagcgtgctcaaatttgagagcaggtagactacagggtagtttccgcatatacaaaaggtgttttaattcttgctgtcagtctcagaagtttcatgctgagataaccaaatttaaatgataaaggtgcaagactgactcttaaaatcacattttttcaaattgccatagcttgctagtgttctcattcactgtgcttttacagcttcattttccactattttaagagaagaaattgctatgaagtgtatgtccaagtgaggaagttccctggtctgaggttgtttaaaacttacaataggccgggcacggtggctcaagcctgtaatcccagcactttgggaggccgaggtgggtggatcacgaggtcaggagttcaagaccaccctggccaacatggtgacaccctgtctctactaaggatacaaaattagccgggcatggtggcacacgcctgtagtcccagctacctaggaggctgaggcaggagaatagctggaacccgggaggcagaggttgcagtgagctgagactgtgccactgcactccagcctgggtgacagagcaagacttggtctcaaaaacaaaaaacaaaaaaaccaaacttggaatagcaagggctgcccattatttaaccttccacggcaattttaacagtggtattctgttccaagtggttaatattaaatccatgtgtcagtgttggtggctttcaaccttggctgcgcataatcattttgatgcttaggctacacccagccgagttatacagaatccctggagggtgggacctgatgagtgttttaatgtttcccgggtaattccaatggtagccaaggttaagaaccagtaccgtacgtacaaaaaagttgagaagctaatttcacgtacagaaaatttgccactgttccaagagcactctcaagcgacataattggcctctactcctattccctacaagtatgaatgggcaggagaagcatcacagagaaagcagagttagtgctggaacttgtatttttgtggatgatgaccttggttaatgttttttcataggctctgtttcataggctttgttttttcataggctctccctcattacattgttctgagaattaaatatggctgcttacatagtaatgaagggttcaacagaggctgttagtggtagtaataatacaagctgaaaaactacacagacaaacctatcagtttctgcctcttcaggatataactattaggttagtgcaaaagtaattgcggtttttgccattaaaagtaatggcacattacttttgcaccaaccgacctaatatgactttcttttagtgttcttaggatttttaattgtaaaacatgtaacaaattttcctaaacaattgtgcaattcagtggcattatttacgatgttacgcaaccactattgtatttccaaaatgtcatcaccctaaacagaagccctgtaacattgtcaattaacttctccttcccttcccctcagcctttggtactgtttctgcctcaatgcatttgtctaagtttagttcatataagtgaaattatacaatacttgtccttttt

SEQ ID NO: 2162 - DNA, 3259 bp, Homo sapiens
ggcgctgcgaagtggaggcgctgcgagcggagccgcgcggagggcgcgaccggctggtccgggcagcgtgggtttgccgccttcggggctccagtccgcgcgccagggctcgagcagtaccgcgggcccctcaggtgggcctcggctcgggacgccgggagtcgggaccgccagtcggggcgccgggaccatggcgctgcgcgcccgggcgctgtacgacttcaggtcggagaacccaggagagatctcgctgcgagagcacgaggtgctgagcctgtgcagcgagcaggacatcgagggctggctcgagggggtcaacagccgcggcgaccgcggcctcttcccggcctcctatgtgcaggtgatccgcgcccccgagcctggcccggcgggagacggcggcccgggcgccccggcccgctacgccaatgtgccccccgggggcttcgagcccctgcctgtcgcgccccccgcctccttcaagccgccgcctgacgccttccaggcgctgctgcagccacagcaggcgccgcctccgagcaccttccagccgcccggcgcgggcttcccgtacggcgggggcgccctgcagccgtcgcctcagcagctctacggcggctaccaggccagccaaggcagcgatgatgactgggacgacgagtgggacgacagctccacggtggcggacgagccgggcgctctgggcagcggagcatacccggacctcgacggctcgtcttcggcgggtgtgggcgcagccggccgctaccgcctgtccacgcgctccgacctgtccctgggttcccgcggcggctcggtccccccgcagcaccacccgtcggggcccaagagctcggccaccgtgagccgcaacctcaatcgcttctccaccttcgtcaagtccggcggggaggccttcgtgctgggggaggcgtcaggcttcgtgaaggacggggacaagctgtgcgtggtgctggggccctatggccccgagtggcaggagaacccctacccgttccagtgcaccatcgacgaccccaccaagcagaccaagttcaagggcatgaagagctacatctcctacaagctggtgcccacgcacacgcaggtgccggtgcatcggcgctacaagcacttcgactggctgtacgcgcgcctggcggagaagttcccggtcatctccgtgccccacctgcccgagaagcaggccaccggccgcttcgaggaggacttcatctctaagcgcaggaagggcctgatctggtggatgaaccacatggccagccacccagtgctggcgcagtgcgacgtcttccagcacttcctgacgtgccccagcagcaccgacgagaaagcctggaagcagggcaagaggaaggccgagaaggacgagatggtgggcgccaacttcttcctgacccttagcacgccccccgccgctgcccttgacctgcaggaggtggagagcaagatcgacggcttcaagtgcttcaccaagaagatggacgacagcgcgctgcagctcaaccacacggccaacgagttcgcgcgcaagcaggtgaccggcttcaaaaaggagtatcagaaggtgggccagtccttccgcggcctcagccaggcctttgagctggaccagcaggccttctcggtgggcctgaaccaggctatcgccttcaccggagatgcctatgacgccattggcgagctcttcgcggagcagcccaggcaggacctggatcccgtcatggacctattagcgctgtatcaggggcatctggctaacttcccggacatcatccacgttcagaaaggtaaagcctggcccttagagcaggtgatatggagtgtattgtgcaggctgaaaggggcgactttgacagcagtaccactgtgggtttcagaatcatattctacaggtgaggaagcgagcagagacgtggacgcctgggtcttttccctagagtgtaagttggattgctcgacaggcagcttcctcctcgagtatcttgcattagggaatgagtactctttctcgaaggttcaaagagtacctttgatgacagtgctatcattttagagtttgaatagttgagtaatgagctgctcaaatctgtaatcttgagacgagggtagaattagaaggggacctaaaccatgttaggtatctgtttgaacactgcactgtcacttagtggtgagtttcaaaaagtgaggaaataatggagaagaacggatgtctgtaaatagaaatctgctttcacccttccacacctctcaatctctgctttggtagaggaattaagatcaattctctgagtttaagaaattcctgcaaagaattcttgcctgcaacctttacgaagtgaagtaatttcaggaaaagcgtactcattttgagtttgaaatctattaatgtactgaaattgagaacgttgtttaggaaaattgtttagggaaactacatagaatgaatataatctgagtattggatctgagagcagcgttgctggtatcccagtgagttagctgtccaactatcagagttcatgagttattaatagttgttagtgtctctgacctttgctaaagcaccagaatttgcaaattaaaaaaatatatagcagtagtgcttgtcttaacatttcttactaatgtgcattctcatataatgccttgattgagagaatggggaggtgtgggagttagggaggcagtcttgcctgtgaaagtccagtgtaggggcggctgggcagggaaacctactcctgagcagggaaacctactgtccctgtttcctcagcgggtctggcctttactggtgaagtgctcactgcctttctggtgggccagtccgtttatgagcaaccctgatctctggcatgtcttttcttgtattgaactgaagtttgcctcccttgattgtctttctgttccctgggaccgccttcagacatttggagacagcagtctcgcttccttcctctctgcttctctccttccccttccaaatgcgtgactggtcttctgactcctatgggggaaggggcttgctgggagaatgatcaaacgttttcagtcttgttgctgccgctgaaagggagtaccctggacatcagtactaattttagtagacagtagtaactttcttggcaatttgcgatttgtaaatgcagtctaatattgaattcgttttttgtgcaatcatattgctgttggcctgtattaaacctgtatttacattaaaaaaaaaaaaaaaaaa

SEQ ID NO: 2163 - DNA, 2307 bp, Homo sapiens
cgcgactagggtgcagcgccaggtccggtgttggggtgtccgagttgccgccggagaggagtggcctcgcccgcttgagttttgattcatcatggataatctgtcatcagaagaaattcaacagagagctcaccagattactgatgagtctctggaaagtacgaggagaatcctgggtttagccattgagtctcaggatgcaggaatcaagaccatcactatgctggatgaacaaaaggaacaactaaaccgcatagaagaaggcttggaccaaataaataaggacatgagagagacagagaagactttaacagaactcaacaaatgctgtggcctttgtgtctgcccatgtaatagaacaaagaactttgagtctggcaaggcttataagacaacatggggagatggtggagaaaactcaccttgcaatgtagtatctaaacagccaggcccggtgacaaatggtcagcttcagcaaccaacaacgggagcagccagtggtggatacattaaacgcataactaatgatgccagagaagatgaaatggaagagaacctgactcaagtgggcagtatcctgggaaatctaaaagacatggccctgaacataggcaatgagattgatgctcaaaatccacaaataaaacgaatcacagacaaggctgacaccaacagagatcgtattgatattgccaatgccagagcaaagaaactcattgacagctaaagctactgctgttcttctttatcatttattcacttccgtagctcctccttgaaagttattaccttttcagagtttaagttttcggttccacgctcttctaattgggagataatatggaagaagggccagagcagttacagccctccttcttttttgttttctgttgagggccgactgctgctctgccttccttctagtattttctttctcaattcatacgcttagattggttttcatatgtcatgtttagtgttttcatcctcctcatatacttcagcaggttcttttgctttcaagatttggaagcattgccaaagacagccatgaagaaggaagctgtagaggtgttttttgttgttgtttatttttgcttttgtggttgagggaaggacaagagataagaggttgttacctcagtaaaaaccttcaggccacaaagcaaaaagttgcatagccacaacgaagatctagttggatatagtttttgatttaagttgcagttatagccaatttaggctaatgcttggttttggagcttttatacacaacgtttttgttaggcatcacagttttgcaacctctgctccaaagagaaaaatagaatgagttttctttcttttttttttttttggagtcagagtctcgctctcttgtccaggctggagtgcaatagcgcgatctgggctcactgcaacctccgcctccctggttcaagcaattctcctgccttgcctcctgagtagctgggattacaggcgtgtgtcaccacgctcggctaatttttgtatttttagtagagacagggtttcaccatgtcaagctggtcttggactcctgacgtcgtgatccacccgccttggcctcccaaagtactgggattacaggcgtgagccactgtgcctggctgagttttcttaaagtgagcttaatttctgaactcttagtgattcatatatgtacataaatctgtgatcccatttcttattgcaccattcaggaacactttatataaatgagtggctttttatttcatattattagtagtatcatggttccattacaggcctattaacatcatacattgtcattagtctttgaagaaaaaatatgtaaatatatatgtgtaacatgagaatttctctctaaagcagggcttaaaattttttggaaaagtttgacaaagcataccacatgaattcagatttacctcaatgctaagaattatgtttagttaggaaaaaggaaagtcattttgacctcaggtagaaaaatagattgctttgagttttatgtagctttagactttaaaaagttagaatttattctgtaactaaaaattatttgaaaaaattatgcctctggtttaattattggtgattacacactctttctcttacccttgtgtattgaactatgtccataatcaagttgatgtggatcctgaaaagtgttatgaacatctgattggtatttgtcacatttattttaaaattagcatctgaacacttcaaagctgtcagtgtgtattggtttcaccaataaccactgcttgatccttacaattaaattttttaactaac

SEQ ID NO: 2164 - DNA, 2148 bp, Homo sapiens
cgcgactagggtgcagcgccaggtccggtgttggggtgtccgagttgccgccggagaggagtggcctcgcccgcttgagttttgattcatcatggataatctgtcatcagaagaaattcaacagagagctcaccagattactgatgagtctctggaaagtacgaggagaatcctgggtttagccattgagtctcaggatgcaggaatcaagaccatcactatgctggatgaacaaaaggaacaactaaaccgcatagaagaaggcttggaccaaataaataaggacatgagagagacagagaagactttaacagaactcaacaaatgctgtggcctttgtgtctgcccatgtaatagcataactaatgatgccagagaagatgaaatggaagagaacctgactcaagtgggcagtatcctgggaaatctaaaagacatggccctgaacataggcaatgagattgatgctcaaaatccacaaataaaacgaatcacagacaaggctgacaccaacagagatcgtattgatattgccaatgccagagcaaagaaactcattgacagctaaagctactgctgttcttctttatcatttattcacttccgtagctcctccttgaaagttattaccttttcagagtttaagttttcggttccacgctcttctaattgggagataatatggaagaagggccagagcagttacagccctccttcttttttgttttctgttgagggccgactgctgctctgccttccttctagtattttctttctcaattcatacgcttagattggttttcatatgtcatgtttagtgttttcatcctcctcatatacttcagcaggttcttttgctttcaagatttggaagcattgccaaagacagccatgaagaaggaagctgtagaggtgttttttgttgttgtttatttttgcttttgtggttgagggaaggacaagagataagaggttgttacctcagtaaaaaccttcaggccacaaagcaaaaagttgcatagccacaacgaagatctagttggatatagtttttgatttaagttgcagttatagccaatttaggctaatgcttggttttggagcttttatacacaacgtttttgttaggcatcacagttttgcaacctctgctccaaagagaaaaatagaatgagttttctttcttttttttttttttggagtcagagtctcgctctcttgtccaggctggagtgcaatagcgcgatctgggctcactgcaacctccgcctccctggttcaagcaattctcctgccttgcctcctgagtagctgggattacaggcgtgtgtcaccacgctcggctaatttttgtatttttagtagagacagggtttcaccatgtcaagctggtcttggactcctgacgtcgtgatccacccgccttggcctcccaaagtactgggattacaggcgtgagccactgtgcctggctgagttttcttaaagtgagcttaatttctgaactcttagtgattcatatatgtacataaatctgtgatcccatttcttattgcaccattcaggaacactttatataaatgagtggctttttatttcatattattagtagtatcatggttccattacaggcctattaacatcatacattgtcattagtctttgaagaaaaaatatgtaaatatatatgtgtaacatgagaatttctctctaaagcagggcttaaaattttttggaaaagtttgacaaagcataccacatgaattcagatttacctcaatgctaagaattatgtttagttaggaaaaaggaaagtcattttgacctcaggtagaaaaatagattgctttgagttttatgtagctttagactttaaaaagttagaatttattctgtaactaaaaattatttgaaaaaattatgcctctggtttaattattggtgattacacactctttctcttacccttgtgtattgaactatgtccataatcaagttgatgtggatcctgaaaagtgttatgaacatctgattggtatttgtcacatttattttaaaattagcatctgaacacttcaaagctgtcagtgtgtattggtttcaccaataaccactgcttgatccttacaattaaattttttaactaac

SEQ ID NO: 2165 - DNA, 2594 bp, Homo sapiens
gcttcgggtgccatggggactcctcccggcctgcagaccgactgcgaggcgctgctcagccgcttccaggagacggacagtgtacgcttcgaggacttcacggagctctggagaaacatgaagttcgggactatcttctgtggcagaatgagaaatttagaaaagaacatgtttacaaaagaagctttagctttggcttggcgatattttttacctccatacaccttccagatcagagttggtgctttgtatctgctatatggattatataatacccaactgtgtcaaccaaaacaaaagatcagagttgccctgaaggattgggatgaagttttaaaatttcagcaagatttagtaaatgcacagcattttgatgcagcttatatttttaggaagctacgactagacagagcatttcactttacagcaatgcccaaattgctgtcatataggatgaagaaaaaaattcaccgagctgaagttacagaagaatttaaggacccaagtgatcgtgtgatgaaacttatcacttctgatgtattagaggaaatgctgaatgttcatgatcattatcagaacatgaaacatgtaatttcagttgataagtccaagccagataaagccctcagcttgataaaggatgatttttttgacaatattaagaacatagttttggagcatcagcagtggcacaaagacagaaagaatccatccttaaagtcaaaaactaatgatggagaagaaaaaatggaaggaaattcacaagaaacggagagatgtgaaagggcagaatcattagcgaaaataaaatcaaaggccttttcagttgtcatacaggcatccaaatcaagaaggcatcgtcaagtcaaactcgactcttctgactctgattctgcatctggtcaagggcaagtcaaagcaactaggaaaaaagagaagaaagaaagattgaaaccagcaggaaggaagatgtctctcagaaacaaaggcaatgtgcagaatatacacaaggaagataaacctttaagtctgagtatgcctgtaattacagaagaagaagagaatgaaagtttgagtggaacagagttcactgcatccaagaagaggagaaaacactgaacaaagagcctggtgtagtttttaattttgagttttctgacagaagaaaagattgatattttgtgtattgaacaggaagactgccagtattaaaaaaatccttctgggaatctgtaggttatttcttggaaattgcaatacgtagttctagaataaaagtacaaaaaattagaataagaattctttaacattttctttaatgatttgcataaatggagataaaacttgtatttagtatgtaatagaaaaaattctgttattcgcagattgttactatttcctataaggttttgtgatactatactgtcctaatacagtctggtaatactattctattttatttaaaatattttttattgaaatattaatgtttattacatgcaaataactattttgtatctacagtcggataatggattttttattttgtatatttattctattttgtatattgttaagtgcaataaagtttttgccttgctttattttttaatacataaaacttacattctcataacgtgattgataacttaggaagttcacaatgtattttctacttctgcaattaaatattctttagtgcttgtttattattactaaatactaattaagtactaacaagtacttaaatactaatgtattaagtatttaagtactttctaataaaatctttaacaataataatgtaaatttcagaatgtgtctctggtacagaatagttgatattaacagaaaaaaaaaaatctgtagcttcatgaatatgccactctgttaatttcttgttccagacattttaatagagattgcttgagccatgttgtttgaattgctgccaatagcagaccatatccctatcatgttgttggctcaactgttttttttttttccctaatagagatggagtatcgctatgttgctcaggctggtcttgaactcctgggctcaagctatcctcctgcctcagcctcccaaagtactgggattataggtgtgagctactgtacccagccttaacctgtttcacagttgattatacttcatgctgttttccagcatggtattattaagggatttaaagtttgggttgcatgcctgtaatcccagcattttgggaggccgaggtgggcggatcacgaggtcaggagatcgagaccatcgtgactaacacagtgaaaccccgtctctaataaaaatacgaaaaattagccaggcgtggtggcgggcgcctgtaatcccagctactcgggaagctgaggcaggagaatggtgtgaacccagtgagccgagatcgtgccactgcactccagcctgggcaacagagtgagacttcgtctcaaaaaaaaaaaaaaaagtttgggttgaagatcaaattcgtgatatctctatatctaatctttaaaaatcagaatgctaatgctgacgcaaataaaattttcatttattagcaaaaaaaaaaaaaaaaaaaaaaaaaaaaa

SEQ ID NO: 2166 - DNA, 3264 bp, Homo sapiens
tctgcttcctcctggggacagtgcatccccaccctgtagttggtggcccagtctgccagagacccagggctccgcagagcacgcagagcacgacttccaaaggcaaagaccattgcccgggctccatggccagtcctggacttccactccgcgggctcagtgggcgtggcgtgcagacccacactggccttgggacaagatctacgacagtcacatcctaactttcagacttctgtggcaagctacttgtcaacaagggtttgctcagtgcgagaggaagatcgaagagcctcgtggtcaagcagtaccacttcccagctaactgaattctcctgtgctcccacccactggaggctaaggcgtctcaatcaccgaatggtaaggtgccacagagcccagtgtcaaatgagttatttttaatattgaaaagaaaaatactcaaataaagctccctcgtctgccccaccactctgtcatgggtgttgggaagtctaaactagataagtgccccctttcttggcataaaaaagacagtgtggatgccgatcaagacggccatgagtcagactccaagaattctgaggaagcctgcttgcgtggttttgtggagcagagcagtggatcagagccaccaacaggagagcaggaccaacctgaggcaaagggggcggggcctgaggagcaagatgaagaagagttcctcaaatttgtgatacttcatgcagaagatgacaccgacgaggccctcagagtccaggatctactgcaaaacgactttggtatcaggccggggatcgttttcgccgagatgccgtgcggaagactgcatttgcagaatctagacgatgcggtcaatgggtcggcctggaccatcttgttactgactgagaacttcctaagagacacctggtgtaacttccagttctacacttccctgatgaattctgtgagcaggcagcacaagtacaactccgtcatacccatgcggcccctgaacagccctcttccccgggaacggactcccttggcgctgcaaaccatcaatgccttagaggaagaaagtcaaggcttttccacacaagtggagagaattttccgggagtctgtatttgagaggcaacaaagtatatggaaagagacacgaagtgtgtcgcagaaacagttcattgcctgaaaccgagcacacaccgggccggctcctgttttgtaaacaaaatgatccatcttcacttgagagagtagtttctaagaaatgcttagacgtgagtctgcttccaagaaatctgtggcacacaagaaaggtacacttctgcagccctaggattgggctactttcgaatgacaaactcaagactgtcagagcttctgacacttttcttaaagttttcatagttcatgaatattcttaactcatttcttgtgttgagccataaacaggcacatgtggcaaaatacgatattgaaaattctcaaaagacttgagggaaatgggctctggccaggacaggtctgaccacttcccttcctgcttctttcatgaattttagttaccacaaagcatcctggtgctgtcacacagaaacatgcagaatggggcacgtgcagtactgacatagtaagttggagatcagaagtagaggtcagggtcagggtcaccgttagtcccagcactagggaggcagaggcaggaagatctctctgagttcataggccagcctggcttacagagtgagttccagcatatccagggctacacaaagaaactgtctcggggggaaaaaatgtcagaacagtcaggcttttggaaataatccagccatgtgtggttttatttctgctggaatttggaactagttcctaccacaaattagcaatcctttcgagagtgtgatagtgagggactctgtagagatgggccctcatcttgtaggtgtcttctgtgaccagggctttaattcacagagcttgtgaaaaatatgtgattcgccagctgtttgcctttaaaatcaataacctctcgtgttagcttttagaaatgtcccttacacacagtgtttaactcggggaatatttcttatctagggctatgggggtggaggggggagcgcgcaagcaaaaccagggacctacacagacctgtacctttccgctcatagaacttcgacccatttgagactgaagcggtttaaacaagcacagacagggcttgtggctaggggaaagtgcctgctgggaatcagaagaccgacttgcagtccaagctctgcccctgcggatgaatgtgccagtgggcagctattctcctttgtctgcgaaataaaagggttggattgatgggtctctaaaggcttttgtcctctctctcccaggatgggaaaaaccgaagccagaaagcaataagcaaagcctgaaacttttatgaggtgaaacataattgtaatcattgcagaaggcatgacgcatgcttacaacaaacagatagatatttctgtatatttgcatcatcatcgatatttactgcagtcacaggaaagaattactatgtatgcctatacttggttctttgggtttggctttgtacagggtctcattatctagccctggctggcctgaaatttgctatgtagacgagattggcttcaaactcatggagatccacctgcctctgaccctgacagtgctaagattaaagatgggcactgccacaccctgctactcgggtttttaaaagatacatatttttataggaattcatgaataccttctccctagtttgcctgtctcctaatcctcccttctctaaatccccaggggccactgtttacttctttatagttgcaagctactgtgccccacagtcagacctggtgttgggttctcagagaaggtgactgctttcatagcattttctcaatcctctttgtcatggtaacttactacttagccttgagtttattgttattattattaattattattactaccataatcctctctatgtctcaagtgtcaggtactcataaaacatgaaccacccacccttcacacgcctgccaagctagaactgatgctcaatggcacttcttcaataaacctttttattctttatggttgactattggtctcatctccagtgaagactgtggaaaagtattctgagaaataccatcctgggcttgtcagagaacatggtgtaatgtcccaggcaacctggagttcagcaatttttttttatgatgaagaaataaattttaagtgcagagt

SEQ ID NO: 2167 - DNA, 980 bp, Homo sapiens
ggggcagacgtgggacgggaaggacggctgccgggactggcgcgcggggacactgggccgacgcgtggagtagcggggagagcgggaagcctgagggggcggggccggcgcgaggccgtgggtgcggcacgaggatgccggcggcgggacagcgcccgtaggcagccccacgggcagggcgcgcgggcggggcggggcgggccgggccagaggagctcccggcatgtcgcaagggctcccggccgccggcagcgtcctgcagaggagcgtcgcggcgcccgggaaccagccgcagccgcagccgcagcagcagagccctgaggatgatgacaggaaggtccgaaggagagaaaaaaaccgagttgctgctcagagaagtcggaagaagcagacccagaaggctgacaagctccatgaggaatatgagagcctggagcaagaaaacaccatgctgcggagagagatcgggaagctgacagaggagctgaagcacctgacagaggcactgaaggagcacgagaagatgtgcccgctgctgctctgccctatgaactttgtgccagtgcctccccggccggaccctgtggccggctgcttgccccgatgaagccggggacactcctctgcccagcaaggagccttggtcattttcatacctgggaggaaggcttttccttcacaattgtatacagggggcacctgtggccaggcctcctcctgggagctccaggaccagccagctgtgttccctgcagactgggctcagcccgacatccaacaggcgccaaactcacagagcccttgtgcagatccagcatggaggccaccctcaggagtgacttctcatccaccctggcagctagtaggttctgctgttatgcagagccatttcctctagaatttggataataaagatgcttattgtctctcccttctccagttctgggaatttacaggcacaatacacttccttttcctgg

SEQ ID NO: 2168 - DNA, 1940 bp, Homo sapiens
gcggttcggcgcggaaagcgggaggtggaggggcggcttggggcaagcgcgcgcgcgcagtgcagaagccagccccccgcggctgaggtactcaaggtgcccaaaggcggggtagtgacctcgcgcgtgcgctgtgcccgcggcagcgccgggtcctagtgtgtgggttgttgttggcaccgcacggcgcgtgcgcagtgaggacggcggagggatttgcggccgggacccaccccctgctccagtcgctatcggaggccgcgcgggtggctgagcagcggcctggtgcgctcgcttagcgggcgacggaatcagacggacgtggacgcccccggagtggaagccgaagcaggagttgttgttgctgaggggctgccgcagccgccgcgagcctccggacagacgccagagcgaggagggcgctacgcgacttggcaagatgacccagttcctgccgcccaaccttctggccctctttgccccccgtgaccctattccatacctgccacccctggagaaactgccacatgaaaaacaccacaatcaaccttattgtggcattgcgccgtacattcgagagtttgaggaccctcgagatgcccctcctccaactcgtgctgaaacccgagaggagcgcatggagaggaaaagacgggaaaagattgagcggcgacagcaagaagtggagacagagcttaaaatgtgggaccctcacaatgatcccaatgctcagggggatgccttcaagactctcttcgtggcgagagtgaattatgacacaacagaatccaagctccggagagagtttgaggtgtacggacctatcaaaagaatacacatggtctacagtaagcggtcaggaaagccccgtggctatgccttcatcgagtacgaacacgagcgagacatgcactccgcttacaaacacgcagatggcaagaagattgatggcaggagggtccttgtggacgtggagaggggccgaaccgtgaagggctggaggccccggcggctaggaggaggcctcggtggtaccagaagaggaggggctgatgtgaacatccggcattcaggccgcgatgacacctcccgctacgatgagaggcccggcccctccccgcttccgcacagggaccgggaccgggaccgtgagcgggagcgcagagagcggagccgggagcgagacaaggagcgagaacggcgacgctcccgctcccgggaccggcggaggcgctcacggagtcgcgacaaggaggagcggaggcgctccagggagcggagcaaggacaaggaccgggaccggaagcggcgaagcagccggagtcgggagcgggcccggcgggagcgggagcgcaaggaggagctgcgtggcggcggtggcgacatggcggagccctccgaggcgggtgacgcgccccctgatgatgggcctccaggggagctcgggcctgacggccctgacggtccagaggaaaagggccgggatcgtgaccgggagcgacggcggagccaccggagcgagcgcgagcggcgccgggaccgggatcgtgaccgtgaccgtgaccgcgagcacaaacggggggagcggggcagtgagcggggcagggatgaggcccgaggtgggggcggtggccaggacaacgggctggagggtctgggcaacgacagccgagacatgtacatggagtctgagggcggcgacggctacctggctccggagaatgggtatttgatggaggctgcgccggagtgaagaggtcgtcctctccatctgctgtgtttggacgcgttcctgcccagccccttgctgtcatcccctcccccaaccttggccacttgagtttgtcctccaagggtaggtgtctcatttgttctggccccttggatttaaaaataaaattaatttcctgttgatagtgggcaaaaaaaaaaaaaaaaaa

SEQ ID NO: 2169 - DNA, 1068 bp, Homo sapiens
gcgcggggcacgctgggacgtctcgctggcgggaggccacgggctttccacagcgcgggggaacgggaggctgcaggatggtcaagctgacggcggagctgatcgagcaggcggcgcagtacaccaacgcggtgcgcgaccgggagctggacctccgggggtataaaattcccgtcattgaaaatctaggtgctacgttagaccagtttgatgctattgatttttctgacaatgagatcaggaaactggatggttttcctttgttgagaagactgaaaacattgttagtgaacaacaacagaatatgccgtataggtgagggacttgatcaggctctgccctgtctgacagaactcattctcaccaataatagtctcgtggaactgggtgatctggaccctctggcatctctcaaatcgctgacttacctaagtatcctaagaaatccggtaaccaataagaagcattacagattgtatgtgatttataaagttccgcaagtcagagtactggatttccagaaagtgaaactaaaagagcgtcaggaagcagagaaaatgttcaagggcaaacggggtgcacagcttgcaaaggatattgccaggagaagcaaaacttttaatccaggtgctggtttgccaactgacaaaaagaaaggtgggccatctccaggggatgtagaagcaatcaagaatgccatagcaaatgcttcaactctggctgaagtggagaggctgaaggggttgctgcagtctggtcagatccctggcagagaacgcagatcagggcccactgatgatggtgaagaagagatggaagaagacacagtcacaaacgggtcctgagcagtgaggcagatgtataataataggccctcttggaacaagtcttgcttttcgaacatggtataatagccttgtttgtgttagcaaagtggaatctatcagcattgttgaaatgcttaagactgctgctgataattttgtaatataagttttgaaatctaaatgtcaattttctacaaattataaaaataaactccactcactatgctaccaaaaaaaaaaa

SEQ ID NO: 2170 - DNA, 1153 bp, Homo sapiens
aactccagggctagtgagctggaccggaagtaggtttctacccgaccgcattttacgtggtgctgcatttccggtagcggcggcgggaaatcggctgtgggagagaggctaggcctctgaggaggcgaatccggcgggtatcagagccatcagaaccgccaccatgacggtgggcaagagcagcaagatgctgcagcatattgattacaggatgaggtgcatcctgcaggacggccggatcttcattggcaccttcaaggcttttgacaagcacatgaatttgatcctctgtgactgtgatgagttcagaaagatcaagccaaagaactccaaacaagcagaaagggaagagaagcgagtcctcggtctggtgctgctgcgaggggagaatctggtctcaatgacagtagagggacctcctcccaaagatactggtattgctcgagttccacttgctggagctgccgggggcccagggatcggcagggctgctggcagaggaatcccagctggggttcccatgccccaggctcctgcaggacttgctgggccagtccgtggggttggcgggccatcccaacaggtgatgaccccacaaggaagaggtactgttgcagccgctgcagctgctgccacagccagtattgccggggctccaacccagtacccacctggccgtgggggtcctcccccacctatgggccgaggagcaccccctccaggcatgatgggcccacctcctggtatgagacctcctatgggtcccccaatggggatcccccctggaagagggactccaatgggcatgccccctccgggaatgcggcctcctccccctgggatgcgaggccttctttgacccttggccacagagtatggaagtagctccgcagaggcgtgggctcgattcctcagggccacgttaccacagacctgtttgtttcttatgctgttgttcgtggagtctcatgggattgtctggtttcccttacagggccccctcccccgggaatgcgcccaccaaggccctagactcatcttggccctcctcagctccctgcctgtttcccgtaaggctgtacatagtccttttatctccttgtggcctatgaaactggtttataataaactcttaagagaacattataattgc

SEQ ID NO: 2171 - DNA, 1281 bp, Homo sapiens
tgaggagcgtggctacgttgcttccggtgcctggctccgtttcctgcttttggttcttacagtagtcggcgtaggccttaggtgggttcgtgcgccttctacctcgctgtttcggttttcctggctcctcggcccttttctcccctgttgcagctgggagcggacgaagcgcgaagctgggattttttactgtctcctgaagaatttaacacaaacatggatatcagaccaaatcatacaatttatatcaacaatatgaatgacaaaattaaaaaggaagaattgaagagatccctatatgccctgttttctcagtttggtcatgtggtggacattgtggctttaaagaccatgaagatgagggggcaggcctttgtcatatttaaggaactgggctcatccacaaatgccttgagacagctacaaggatttccattttatggtaaaccaatgcgaatacagtatgcaaaaacagattcggatataatatcaaaaatgcgtggaacttttgctgacaaagaaaagaaaaaagaaaagaaaaaagccaaaactgtggaacagactgcaacaaccacaaacaaaaagcctggccagggaactccaaattcagctaatacccaaggaaattcaacaccaaatcctcaggtccctgattaccctccaaactatattttattccttaataacttaccagaagagactaatgagatgatgttatccatgctgtttaatcagttccctggcttcaaggaagtacgtctggtaccagggaggcatgacattgcttttgttgaatttgaaaatgatgggcaggctggagctgccagggatgctttacagggatttaagatcacaccgtcccatgctatgaagatcacctatgccaagaaataacatttgggatagtcgtctttaaaagacttggtgttatttacagtgtttgttttgataacatttggctgggtcattttaatagttagagatgaggaggagtaaaagtgaaatttttgtgaaggacttaaattatccagtgtttctttagccttggtgaactatgaaatacgaaggccttaattttgtacaataaacttttatttgtattctgtgtatataatgctttcttgattgacccatctccctatcatcaaatgacttctagtctagaacacacttaaggtttataaacttgtgtaataggatgcttttctagtgttactttggaggagctaattatacaacatcattgaaccattcaataaaagttaagtaaaattagatcac

SEQ ID NO: 2172 - DNA, 733 bp, Homo sapiens
gaattccagagcaacatgcccaagttttattgtgactactgcgatacatacctcacccatgactctccatctgtgagaaagacacactgcagtggaaggaaacacaaagagaatgtgaaagactattatcagaaatggatggaagagcaggctcagagcctgattgacaaaacaacggctgcatttcaacaaggaaagatacctcctactccattctctgctcctcctcctgcaggggcgatgataccacctccccccagccttccgggtcctcctcgccctggtatgatgccagcaccccatatggggggccctcccatgatgccaatgatgggccctcctcctcctgggatgatgccagtgggacctgctcctggaatgaggccgcccatgggaggccatatgccaatgatgcctgggcccccaatgatgagacctcctgcccgtcccatgatggtgcccactcggcccggaatgactcgaccagacagataaggatagaggggaggccttattgtatcggttttatattacctgttctgcttcaccaggagatcatgctgctgtgatactgagttttctaaacagcataaggaagacttgctcccctgtcctatgaaagagaatagttttggaggggagaagtgggacaaaaaagatgcagttttcctttgtattgggaaatgtgaaaataaaattgtcaactctttcagttaaaaaaaaaaaggaattc

SEQ ID NO: 2173 - DNA, 1614 bp, Homo sapiens
agtgctccgcgcgctcttgacgtccggagcccctggagtaggcgcttccggccattcatactgcagtcggtcagtgttcggttgaaggattctgtgtgctgtcggacccagagggtgacggcgccgctaggatgaagctcgtgagatttttgatgaaattgagtcatgaaactgtaaccattgaattgaagaacggaacacaggtccatggaacaatcacaggtgtggatgtcagcatgaatacacatcttaaagctgtgaaaatgaccctgaagaacagagaacctgtacagctggaaacgctgagtattcgaggaaataacattcggtattttattctaccagacagtttacctctggatacactacttgtggatgttgaacctaaggtgaaatctaagaaaagggaagctgttgcaggaagaggcagaggaagaggaagaggaagaggacgtggccgtggcagaggaagagggggtcctaggcgataatgtctctcaagatttcaaagtcatatgagatttgggatattttttgtacaggttgtgtttgtttatgtcagtttttaataaacataaatgtgggacagagctgtctatttagtatatcaaagttttagtagtttcctccacattcacgaaattaccacagtgagagctaagcatttctactgggcagtttcatttttagttgatcaggttttaagtttttgaactaaaatttttctttttctttttatgatgaataaggttaaaataaaagccttagacaaattaaatttggcagagtttaattgagcaaaggacaattcacaaatcaggtagcccctgaaccataataggctcagaggcttcagcccagctgcatagttgaagatttatggacagaaggaaagtgatgtatggaaaatggaagtgagatacagcaacagccggattagttacagttcagcgtttgccttatttgaatatggtttgaacagttcgctgtctttggttggctgaaacttagtgattgccacaagagtagggtaccgtctgtttacacgtccagttaggctacagttctatgtactgagaaacctttaagctgaacttgagatatgtaaagagactttaggctaaacttaacaatatatataggatatatacccttctacttcacatgcactgaatatgcattttattgctttactcttcattctgtggcacctacccacaggggaagtaagaagtttgttttggtatttcggaaactaaagtccttatgggatggggtctagaattgattctcctttcctgagttttactccacggagtcttaggtacctggtaaaaagttgtcttctaaattaagggtcattgctttgttgtctagctgctaatgtcttacttttgtttcttttgctttttaatcagttcttaataggatatagttttatgttttccaagttataacttggagttaatggtcactagattatcagttatgagcagtgttaaaatctcctattaatgtgtaatgtacctgtcagtgcctcctttattaaggggttctttgagaataaaagagaaaagacctactttatttgacagcaaaaaaaaaaaggaattc

SEQ ID NO: 2174 - DNA, 876 bp, Homo sapiens
taccattcttcaagaaacggtttgaatcagactgcctttccttttgtcttcattgtcataaacatctgcccccgtgtggttctgactggccgcgaacccctacccgaagcttttattccatcattgtgcaccgttggtggggaatgctgtggcaacaggccacgcctccacttactggttggctttgcgcaggcgccaacggaagtgggtcgcaggaagaggaagtcccgcctctctctcctcaggcagcagcaacgcggaggaaacgggagtgaacggagagcgtagtgaccatcatgttttagcacaaccccctcagaccactctgtggagaacagactgtcagggaacgtgggtggaggcagagagaccagaaagattccaggacagagatgacagaggcttaggccatgagcctcctcaacaagcccaagagtgagatgaccccagaggagctgcagaagcgagaggaggaggaatttaacaccggtccactctctgtgctcacacagtcagtcaagaacaatacccaagtgctcatcaactgccgcaacaataagaaactcctgggccgcgtgaaggccttcgataggcactgcaacatggtgctggagaacgtgaaggagatgtggactgaggtacccaagagtggcaagggcaagaagaagtccaagccagtcaacaaagaccgctacatctccaagatgttcctgcgcggggactcagtcatcgtggtcctgcggaacccgctcatcgccggcaagtaggggccgcctgtctgttgacagaactcactcctctgtcctatgaagaccgctgccattggtgttgagaataataaagctctgtgtttttttctaaaaaaaaaaaaaaaaa

SEQ ID NO: 2175 - DNA, 1385 bp, Homo sapiens
gggaagtcctggcccttggcccaacctcctgctgtccccggtctgagggcccaagccccgcgtctccgccttgccgtccagcctgtccttggtgtggggtgcttggaagtgtgagcaccctctctggctctttgccggccccaagggtcgttgcggcggcccccgggcccagtcatcagccctcttttccggtgccggaactatcgtactggtgccctagtttcccagccggcaggcggagtgaggaggaagcggaggcgagaccgcgctcaacactggggaaaggaaggaggcgggccctgcgcgcagcattttgggaaagagtggaattctgggtgttaggcccgccattcgcttgactcacgccttcgccgtagcatctttcgcagcggaccgaagagaagaaaagtaggccagagccgaactctcttcctgccaagatgtctattggtgtgccgattaaagtactgcatgaggccgagggccacattgtgacatgtgagacgaacaccggtgaggtatatcgggggaagctcattgaagcagaggacaacatgaactgccagatgtccaacatcacagtcacatacagagatggccgagtggcacagctggagcaggtatacatccgtggcagcaaaatccgctttctgattttgcctgacatgctgaagaacgcacccatgttaaagagcatgaaaaataaaaaccaaggctcaggggctggccgaggaaaagctgctattctcaaggcccaagtggccgcaagaggaagaggacgtggaatgggacgtggaaacatctttcaaaagcgaagataattttctaagttgaacagaactttgtccttttttctttcaggttatctgagttcattggagtgggtgcttgtgcatatatgctaggtatcttttgccatctttctctttagatcaggggaaatgtttaagctaaataaatctggggggttttttgttctgttttgttttgttttctttgagaaaataaggactttgtgttcatttgaagtttgctttggctaaattttgacaccctgggggatgtcctgggagaatgccagtactttgaaatagcacagctattgatgagattttaagctgctgttcctggccagttgcaggttaagccccagaaaagttcaccttggagaagctccgagaacacacagattgtgtctcattcatcttcagacacaggcacatagtgtggcactttgttcagttaacatttgtggagctgtcatcagctcagctttaacaacacaggtgactctttcccttgataaagtcataggtaattcaggggctgggtgcggcggctcacgcatgtaatcccagcactttgggaggccaaggcgggcggat

SEQ ID NO: 2176 - DNA, 1593 bp, Homo sapiens
gttgctctcagaggcagcgtgcgggtgtgctctttgtgaaattccaccatggcgtaccgtggccagggtcagaaagtgcagaaggttatggtgcagcccatcaacctcatcttcagatacttacaaaatagatcgcggattcaggtgtggctctatgagcaagtgaatatgcggatagaaggctgtatcattggttttgatgagtatatgaaccttgtattagatgatgcagaagagattcattctaaaacaaagtcaagaaaacaactgggtcggatcatgctaaaaggagataatattactctgctacaaagtgtctccaactagaaatgatcaatgaagtgagaaattgttgagaaggatacagtttgtttttagatgtcctttgtccaatgtgaacatttattcatattgttttgattaccctcgtgttactacaagatggcaataaatactatgggattgtttgtattaaaaaatttacattgcttcttactattcagcagtagaaactttttacacagtaacaccattcgttgttggtatttagttttctgaagggtcgcagttgccttgagcacttggtattcgcagagcttggacctgtagattttgaggcagattaggaattctgcctgatgggtaagcttccagtattgggaggtggagaaggggagggttcagaaaaataaataagagttattgcactaacaaaagtcttcatcacttgtagttctggatgctggaataccagagtttctaacctaaatacgttgggtacattatttaatggggtcagtattgctcaacactctcattgagtcactgtgaggtctttgtgaattttatcgctaagatcagaatgtgagaagtatttggatatagggaaagaatgaagtgcctttcaagtacattaaaaatcagttaagagtttacaggaaagagactgagattggtaatctgaaaaggaccacaagcatagctggtaggcaaattgttaggcagaataatggtatgttggagaaatacacctgtctcttattcttatctcttaagaattttggttcttcccccagtgattgctggttgaattcttatatggacaggtttcccttcccccagtatcgcacatggttctagttagaatcctgttagatagtgagcatctgctgttagctagacactgttgaatcaatacagtgaaacagacaggtaagcaggtggttttaatgcctcattctaagtgctatttaaattggatcttgaaagatgaataaggcctgccttaagttctgctaaaggcaatgttgttattaaggacgggtgaggaaggaccaagaagtctggctcctgcttttctacatgcctgtgaaggagacttttcatgaaactgaataaaagaaatcctttccgagatagaggagatttgtaggtgaatgcagaagtgtatccagctttgaaccatgcattccatctatattcctcctgtctgaactcatgctcttttgattatgttttgaaataaagggctgcattagttcttttaaaaaaaaaaaaaaaaaaaaaaaaaaaaaaaaaaaaaaaaaaaaaaaa

SEQ ID NO: 2177 - DNA, 279 bp, Homo sapiens
atggcatacagtggccagggccagaaagtgcagaaggttatggtgcagcccatcaacctcatcttcagatacttacaaaatagatcgcagattcaggtgtggctctatgagcaagtgaatatgcagatagaaggctgtatcattggttttgatgagtatatgaaccttgtattagatgatgcagaagagattcattcgaaaacaaagtcaagaaaacaactgggtcggatcatgctaaaaggagataatattactctgctacaaagtgtctccaactag

SEQ ID NO: 2178 - DNA, 806 bp, Homo sapiens
gggaggtgaaaggtcatagtcctgtttggcggccatttctcttgaaactgcggctcgggacctgcggtacctgctgtagtcacgagggacgggcggcggcctggtcggcagagagtagcctgcaacattcggccgtggttacgatgagtttacccctcaatcccaaacctttcctcaatggactaacaggaaagccagtgatggtgaaacttaagtggggaatggagtacaagggctatctggtatctgtagatggctacatgaacatgcagcttgcaaatacagaagaatacatagatggagctttgtctggacatctgggtgaagttttaataaggtgtaataatgtcctttatatcagaggtgtggaagaagaggaagaagatggggaaatgagagaatagcatcttttgtgggggattttttttatatatatttctagacaataaagatttgtttgtttttcaacttgacttgtgaactatttgtattcagatatttacaagcaaagctgaaatgatgaaccaattgggaaagattactcactgaactaatgctttaaaagccactgaatttcatttaagttgcttttcttttgtaagcccaatattcttttttttcccataaaggataattatttatatgctttagatatttttatgaaggtgaatttcagaccttttcttgtaaaattatctattagctgagaccttttaaatgcaactttttcttttaaagttatttttgagctacttttaacgtataaaattaaacattttcttggtattaataaaaaaaaaaaaaaa

SEQ ID NO: 2179 - DNA, 606 bp, Homo sapiens
agacgcaagacgccgggcctacagcgggagcgtgaggaaagccgtgcgttgcgttccaaggcatctgtgagcccgcggagtatacaccatgagcaaagctcaccctcccgagttgaaaaaatttatggacaagaagttatcattgaaattaaatggtggcagacatgtccaaggaatattgcggggatttgatccctttatgaaccttgtgatagatgaatgtgtggagatggcgactagtggacaacagaacaatattggaatggtggtaatacgaggaaatagtatcatcatgttagaagccttggaacgagtataaataatggctgttcagcagagaaacccatgtcctctctccatagggcctgttttactatgatgtaaaaattaggtcatgtacattttcatattagactttttgttaaataaacttttgtaatagtcaaaaatgctttctcagatgttctgaatatagaatatcagctctcattccagttttttctaacatgaattttcctggttgacattgatttcaaagggttttatgcattaaagtgaaagaatcttattaaatgcgaaaaaaaaaaaaaaaaaaaaaaaaaaaaa

SEQ ID NO: 2180 - DNA, 1532 bp, Homo sapiens
aagccatgggtagctgttgtagctgtccagataaagacactgtcccagataaccatcggaacaagtttaaggtcattaatgtggatgatgatgggaatgagttaggttctggcataatggaacttacagacacagaactgattttatacacccgcaaacgtgactcagtaaaatggcactacctctgcctgcgacgctatggctatgactcgaatctcttttcttttgaaagtggtcgaaggtgtcaaactggacaaggaatctttgcctttaagtgtgcccgtgcagaagaattatttaacatgttgcaagagattatgcaaaataatagtataaatgtggtggaagagccagttgtagaaagaaataatcatcagacagaattggaagtccctagaacacctcgaacacctacaactccaggatttgctgctcagaacttacctaatggatatccccgatatccctcatttggagatgcttcatcccatccgtcaagcagacatccttctgtgggaagtgctcgcctgccttcagtaggggaagaatctacacatcctttgcttgtggctgaggaacaagtacatacctatgtcaacactacaggtgtgcaagaagagcggaaaaaccgcacaagtgtgcatgttccattggaggcaagggtttctaacgctgaaagcagcacaccaaaagaagaaccaagtagtattgaggacagggatcctcagattcttcttgaacctgaaggagtcaaatttgttttagggccaacccctgttcaaaagcagttaatggaaaaagagaaactggagcaacttggaagagatcaagttagtggaagtggagcaaataacacagaatgggacactggctatgacagtgatgaacgaagagatgcaccctctgttaacaaactggtgtatgaaaatataaatgggctatctatccctagtgcctcaggggtcaggagaggtcgtctgacatccaccagtacctcagatacccagaatatcaacaactcagctcagagaagaactgcattattaaactatgaaaatctaccatctttgcctcctgtttgggaagcccgcaagctaagtagggatgaagatgacaatttaggaccaaagaccccatctctaaatggctaccataataatctagatccaatgcataactatgtaaatacagagaatgtaacagtgccagcaagtgctcacaaaatagaatattcaaggcgtcgggactgtacaccaacagtctttaactttgatatcagacgcccaagtttagaacacaggcagcttaattacatacaggttgacttggaaggtggcagtgactctgacaaccctcagactccaaaaacgcctacaactccccttccacaaacccctaccaggcgcacagagctgtatgccgtgatagacatcgagagaactgctgctatgtcaaatttgcagaaagcactgccacgagatgatggtacatctaggaaaactagacacaatagtactgatctgcccatgtga

SEQ ID NO: 2181 - DNA, 2146 bp, Homo sapiens; identical to SEQ ID NO: 2116

SEQ ID NO: 2182 - DNA, 642 bp, Homo sapiens
ggggccgtgcgcgctcctgcctcaggcctctgtcccccaccccctttccccggtcccaggctctccttcggaaagatgtcggacacggcagtagctgatacccggcgccttaactcgaagccgcaggacctgaccgacgcttacgggccgccaagtaacttcctggagatcgacatctttaatcctcagacggtgggcgtgggacgcgcgcgcttcaccacctatgaggttcgcatgcggacaaacctacctatcttcaagctaaaggagtcctgcgtacggcggcgctacagtgactttgagtggctgaaaaatgagctggagagagatagcaagattgtagtaccaccactgcctgggaaagccttgaagcggcagctccctttccgaggagatgaagggatctttgaggagtctttcatcgaagaaaggaggcagggcctcgagcagtttattaacaaaattgctgggcacccactggctcagaatgaacgctgcctacacatgttcctgcaagaggaggcaattgacaggaactacgtcccggggaaggtgcgccagtaggagcccctctcaccacctgccctctactttcctgctgaaatgacattggtttttacactaagcctctctctgtctttg

SEQ ID NO: 2183 - DNA, 981 bp, Homo sapiens
gtttggggccagagtgggcgaggcgcggaggtctggcctataaagtagtcgcggagacggggtgctggtttgcgtcgtagtctcctgcagcgtctggggtttccgttgcagtcctcggaaccaggacctcggcgtggcctagcgagttatggcgacgaaggccgtgtgcgtgctgaagggcgacggcccagtgcagggcatcatcaatttcgagcagaaggaaagtaatggaccagtgaaggtgtggggaagcattaaaggactgactgaaggcctgcatggattccatgttcatgagtttggagataatacagcaggctgtaccagtgcaggtcctcactttaatcctctatccagaaaacacggtgggccaaaggatgaagagaggcatgttggagacttgggcaatgtgactgctgacaaagatggtgtggccgatgtgtctattgaagattctgtgatctcactctcaggagaccattgcatcattggccgcacactggtggtccatgaaaaagcagatgacttgggcaaaggtggaaatgaagaaagtacaaagacaggaaacgctggaagtcgtttggcttgtggtgtaattgggatcgcccaataaacattcccttggatgtagtctgaggccccttaactcatctgttatcctgctagctgtagaaatgtatcctgataaacattaaacactgtaatcttaaaagtgtaattgtgtgactttttcagagttgctttaaagtacctgtagtgagaaactgatttatgatcacttggaagatttgtatagttttataaaactcagttaaaatgtctgtttcaatgacctgtattttgccagacttaaatcacagatgggtattaaacttgtcagaatttctttgtcattcaagcctgtgaataaaaaccctgtatggcacttattatgaggctattaaaagaatccaaattcaaactaaaaaaaaaaaaaaaaaa

SEQ ID NO: 2184 - DNA, 8482 bp, Homo sapiens
ggagcctggaggactagcgaggaggagttgagagaacggagcggacgccatggcgaccaacatcgagcagatttttaggtctttcgtggtcagtaaattccgggaaattcaacaggagctttccagtggaaggaatgaaggccagctgaatggtgaaacaaatacacccattgaaggaaaccaggcgggtgatgcagctgcctctgccaggagtctaccaaatgaagaaatagtgcagaagatagaggaagtactttctggggtcttagatacagaactacgatataagccagacttgaaagagggctccagaaaaagtagatgcgtatctgtacaaacagatcctactgatgaaattcccactaaaaagtcaaagaagcataaaaagcacaaaaacaaaaagaagaaaaagaagaaagaaaaggaaaaaaaatataaaagacagccagaagaatctgagtcaaagacgaaatctcatgatgatgggaacatagatttagaatctgattcctttttaaagtttgattctgaaccttcagctgtggcgctggagcttcctacaagagcatttggcccatctgagaccaatgaatcccctgcagttgtgctagaacctcctgtagtatcaatggaggtatcagagccacacatcttagaaactctgaagccagctacaaaaactgcagaactgtcagttgtatctacatcagtaatctcagagcagtcagagcagtctgtggcagtaatgccagaaccatccatgacaaagattctggattcctttgcagcagcaccagtgcctactacaacactggtgttgaagtcatctgagccagttgtaacaatgtcagtggagtatcagatgaagtctgtgctgaaatctgtggagagcacatctccagagccatcaaagatcatgttggtagagcccccagtagcaaaagtgttagagccttcagaaacccttgtggtatcatcagagacacctactgaggtgtaccctgagccaagcacatcaacaacaatggattttccagagtcatctgcaattgaagcgctaagattgccagagcagcctgtagacgtaccatcggagattgcagattcatccatgacaagaccgcaggagttgccggagctgcctaagaccacagcgttggagctgcaggagtcgtcggtggcctcagcgatggagttgccggggccacctgcgacctccatgccggagttgcaggggccccctgtgactccagtgctggagttacctgggccctctgctaccccggtgccagagttgccagggcccctttctaccccagtgcctgagttgccagggccccctgcgacagcagtgcctgagttgccagggccctctgtgacaccagtgccacagttgtcgcaggaattgccagggcttccagcaccatccatggggttggagccaccacaggaggtaccagagccacctgtgatggcacaggagttgccagggctgcctttggtgacagcagcagtagagttgccagagcagcctgcggtaacagtagcaatggagttgaccgaacaacctgtgacgacgacagagttggagcagcctgtggggatgacaacggtggaacatcctgggcatcctgaggtgacaacggcaacagggttgctggggcagcctgaggcaacgatggtgctggagttgccaggacagccagtggcaacgacagcgctggagttgccggggcagccttcggtgactggggtgccagagttgccagggctgccttcggcaactagggcactggagttgtcggggcagcctgtggcaactggggcactagagttgcctgggccgctcatggcagctggggcactggagttctcggggcagtctggggcagctggagcactggagcttttggggcagcctctggcaacaggggtgctggagttgccagggcagcctggggcgccagagttgcctgggcagcctgtggcaactgtggcgctggagatctctgttcagtctgtggtgacaacatcggagctgtcaacgatgaccgtgtcgcagtccctggaggtgccctcgacgacagcgctggaatcctataatacggtagcacaggagctgcctactacattagtgggggagacttctgtaacagtaggagtggatcccttgatggccccagaatcccatatattagcttctaacaccatggagacccatatattagcatccaacaccatggactcccaaatgctagcgtccaacaccatggactcccagatgctagcatccaacaccatggactcccagatgttagcgtctagcaccatggactcccagatgttagcaactagctccatggactcccagatgttagcaactagctccatggactcccagatgttagcaactagcactatggactcccagatgttagcaaccagttccatggactcccagatgttagcaaccagctccatggactcccagatgttagcaaccagctccatggactcccagatgttagcaaccagctccatggactcccagatgttagcaaccagcaccatggattctcagatgttagcaaccagcaccatggactcccagatgttagcaactagctcaatggattcccagatgttagcatctggcactatggactctcaaatgttagcttctggcaccatggatgctcagatgttagcgtctggtaccatggatgcccagatgttagcgtctagtacccaagattctgctatgttgggttcaaaatctcctgatccctataggttagctcaggatccttacaggttagctcaggatccctataggttgggccatgacccctatagattaggtcatgatgcttacaggttaggacaagacccttatagattaggccatgatccctacagactaactcctgatccctataggatgtcacctagaccctacaggatagcacccaggtcctatagaatagcacccaggccatataggttagcacctagacccctgatgttagcatctagacgttctatgatgatgtcctatgctgcagaacgttccatgatgtcatcttacgaacgctctatgatgtcttatgagcggtctatgatgtcccctatggctgaacgctctatgatgtcagcctacgagcgctctatgatgtcagcctacgagcgctctatgatgtcccctatggctgagcgctctatgatgtcagcttatgaacgctccatgatgtcagcttatgaacgctccatgatgtccccaatggctgatcgatctatgatgtccatgggtgctgaccggtctatgatgtcgtcatactctgctgctgaccggtctatgatgtcatcgtactctgcagctgaccgatctatgatgtcatcttatactgctgatcgttcaatgatgtctatggctgctgattcttacaccgattcttacactgacacatatacagaggcatatatggtgccacctttgcctcctgaagagcccccaacaatgccaccgttgccacctgaggagccaccaatgacaccaccattgcctcctgaggaaccaccagagggtccagcattgcccactgagcagtcagcattaacagctgaaaatacttggcctacagaggtgccatcatcaccatctgaagagtctgtatcgcagcctgagcctcctgtgagtcaaagtgagatttcggagccttcagcagtgcctactgattattcagtgtcagcatcagatccctcagttttagtatcagaggctgctgtgactgttccagaaccaccaccagagccagaatcttcaattacgttaacacctgtagagtctgcagtagtagcagaagaacatgaagttgttccagagagaccagtgacttgtatggtatctgaaactcccgccatgtcagctgaaccaactgtgttagcatcagagcctcctgttatgtcagagacagcagaaacatttgattccatgagagcctcaggacatgttgcctcagaagtatctacatccttgttggttccagcagtaactactccagtgctggcagagagcattctggagccgccagccatggctgccccagagtcttcagctatggctgtcctggagtcttcggctgtgaccgtcctggagtcttcgactgtgactgtcctggagtcttcgactgtaactgtcctggagccttcggttgtgactgtcccggagcctcctgttgtggctgagccagactatgttaccattcctgtgccagttgtttctgcgctggagccttctgtgcctgttctggaaccagcggtgtcagtccttcaaccttctatgattgtttcagaaccatctgtttctgtccaggaatcgactgtgacagtttcagagcctgctgtcacagtctcagagcagactcaagtaataccaactgaggtggctatagagtccacaccaatgatactggaatctagtatcatgtcatcacatgttatgaaaggaattaatctatcctctggtgatcaaaatcttgctccagagattggcatgcaggagattgcattgcattcaggtgaagaaccacatgctgaggaacacctgaaaggtgacttttacgaaagtgaacatggtataaatatagaccttaatataaataatcatttaattgctaaagagatggaacataatacagtgtgtgctgctggtactagtcctgttggggaaattggtgaagagaaaattttgcccaccagtgagactaaacagcgcacagtattggatacctaccctggtgttagtgaagctgatgcaggagaaactctatcttctactggtccttttgctctggaacctgatgcaacaggaactagtaagggtattgaatttaccacagcatctactctcagtttagttaataaatatgatgttgatttatctttaactactcaagatactgaacatgacatggtaatttccaccagtcctagtggtggtagtgaagctgacattgaagggcctttgcctgctaaagatattcatcttgatttaccatctaataataaccttgttagtaaggatacagaagaaccattacctgtaaaagagagtgaccagacattagcagctctgctcagccctaaagaaagtagtggaggagaaaaagaagtacctccccctcctaaagagacactgcctgattcaggattttctgccaatattgaggatattaatgaagcagatttagtgagaccgttacttcctaaggacatggaacgtcttacaagccttagagctggcattgaaggacctttacttgcaagtgatgttggacgtgacagatctgctgccagcccggttgtaagtagtatgccagaaagagcttcagagtcttcttcagaggaaaaagatgattatgaaatttttgtaaaagttaaggacactcacgaaaaaagcaagaaaaataagaaccgtgataagggggagaaagagaagaaaagagactcttcattaagatctcgaagtaagcgttccaaatcttctgaacacaaatcacgcaagcgtaccagtgaatctcgttctagggcaagaaagagatcatctaagtccaagtctcatcgctctcagacacgttcacggtcacgttcaagacgcaggaggagaagcagcagatcaagatcaaagtctagaggaagaagatctgtatcaaaagagaagcgcaaaagatctccaaagcacagatccaagtctagggaaagaaaaagaaaaagatcaagctccagggataaccgaaagacagttagagctcgaagtcgaaccccaagtcgtcggagtcggagtcatactccaagtcgtcgacgaaggtctagatctgtgggtagaagaaggagctttagcatttccccaagccgccgcagccgcacccccagccgccgcagccgcacccccagccgccgcagccgcacccccagccgccgcagccgcacccccagccgccggagccgcacccctagccgtcggagccgcaccccaagccgccggagaagatcaaggtctgtggtaagaagacgaagcttcagtatctcaccagtcagattaaggcgatcaagaacacccttaagaagaaggtttagcagatctcccatccgtcgtaaaagatccaggtcttctgaacgaggcagatcacccaaacgtctgacagatttggataaggctcaattacttgaaatagccaaagctaatgcagctgccatgtgtgctaaggctggtgtccctttaccaccaaacctaaagcctgcacctccacctactatagaagagaaagttgctaaaaagtcaggaggagctactatagaagaactaactgagttttagaagccaaactgactgaggagtgggacggttcgtttgaatggaggaggtgttgagtgagcaacacgcagaagctcgcctacagtttcgtttccattcacgacgcgttcactgatcgccaaatgtaaacagatcgcacagagtaaagaagatgatgatgtaatagtgaataaacctcatgtttcggatgaagaggaagaagaacctcctttttatcatcatccctttaaactcagtgaacccaaacctatttttttcaatctgaatattgctgcagcaaaaccaactccaccaaaaagccaggtaacattaacaaaagaattccctgtatcatctggatctcaacatcggaaaaaagaagcggatagtgtttatggagaatgggttcctgtggagaaaaatggtgaagaaaacaaagatgatgataatgttttcagcagcaatttgccctcagagcctgtggacatctctacagcaatgagtgaacgggcacttgctcagaaaagactcagtgagaatgcatttgatcttgaagccatgagcatgttaaatagagctcaggaaaggattgatgcctgggctcagctgaactctattcctggccagttcacaggaagtacaggagtacaggttttgacacaagaacagttggccaatactggtgcccaagcctggattaaaaaggatcagttcttaagagcagccccggtaactggaggaatgggagccgttttgatgagaaaaatgggctggagagaaggagaaggattaggaaaaaacaaagaaggcaataaggaacccatcctagttgattttaagacagaccgaaaaggtcttgttgcagtaggagaaagagcacaaaagaggtctgggaacttctctgctgcaatgaaagatctgtcaggcaaacatcctgtgtctgctttgatggagatctgtaataaaagaaggtggcaaccacctgaatttctattggtccatgatagtggccctgatcatcgcaaacattttctctttagggtattgataaatggaagcgcttaccagcccagctttgccagccctaataagaagcatgctaaagccacagcagctactgtggttcttcaagcaatgggccttgtaccaaaggacctcatggctaatgccacttgcttcaggagtgcctcacgtagatagattgaggttttataataatcatttcagaattttactctgcatcacaatgtatttcctctttaatgttgtaaatatttggcaatttaagacattgtgtaaaaagcaatctgtaaaaacatctccaggctttgatttttgtaccatggaaattgtatttaaccatacagggttttggtatgtttatattgtttaccttagtgatgtatttgtttaagtggctaacatccaaacgactgtttgaaggcatcagagtaatcttcagtgtggaatgttaaataacgcttttatactgtattttgtactatgatgtaactccccttccttatggctaggctactgtaacacttgcctgtaatcagtgaagggctgtgcaccttgtactatttcacaatgggttctgctggacagataatgggccagtgttattgaggtgatcaagatctgttccacagggctaatgccaccatctcccctcaaaattttgtagaggttctaaaaagaaagtggtatgttgtgtgatgatcagcactaagtcctgcattcctgttaaagccacttgggtcataagaagggagtaaaaaatgaagtctgactagaattctattgcagaggccagtacatttagtatggcattgagttgtgatatagttttactttgatgtgcattttgaatttcagctacacctagatagacgtaaaatgataattaaaatgctgtaaccaacttatctaataaaattggcaaccagccactattttgttgactatgagaaagttaaaagtttatgttaatttttagggtctgatagaatatttcatgtgtattacagtggtattcatatgctatgtctctaaactttattttcaaaagcttaaggcccaaatacaaacttctctggaataaacgtggtgttttattttctgggttat

SEQ ID NO: 2185 - DNA, 8266 bp, Homo sapiens
ggagcctggaggactagcgaggaggagttgagagaacggagcggacgccatggcgaccaacatcgagcagatttttaggtctttcgtggtcagtaaattccgggaaattcaacaggagctttccagtggaaggaatgaaggccagctgaatggtgaaacaaatacacccattgaaggaaaccaggcgggtgatgcagctgcctctgccaggagtctaccaaatgaagaaatagtgcagaagatagaggaagtactttctggggtcttagatacagaactacgatataagccagacttgaaagagggctccagaaaaagtagatgcgtatctgtacaaacagatcctactgatgaaattcccactaaaaagtcaaagaagcataaaaagcacaaaaacaaaaagaagaaaaagaagaaagaaaaggaaaaaaaatataaaagacagccagaagaatctgagtcaaagacgaaatctcatgatgatgggaacatagatttagaatctgattcctttttaaagtttgattctgaaccttcagctgtggcgctggagcttcctacaagagcatttggcccatctgagaccaatgaatcccctgcagttgtgctagaacctcctgtagtatcaatggaggtatcagagccacacatcttagaaactctgaagccagctacaaaaactgcagaactgtcagttgtatctacatcagtaatctcagagcagtcagagcagtctgtggcagtaatgccagaaccatccatgacaaagattctggattcctttgcagcagcaccagtgcctactacaacactggtgttgaagtcatctgagccagttgtaacaatgtcagtggagtatcagatgaagtctgtgctgaaatctgtggagagcacatctccagagccatcaaagatcatgttggtagagcccccagtagcaaaagtgttagagccttcagaaacccttgtggtatcatcagagacacctactgaggtgtaccctgagccaagcacatcaacaacaatggattttccagagtcatctgccattgaagcgctaagattgccagagcagcctgtagacgtaccatcggagattgcagattcatccatgacaagaccgcaggagttgccggagctgcctaagaccacagcgttggagctgcaggagtcgtcggtggcctcagcgatggagttgccggggccacctgcgacctccatgccggagttgcaggggccccctgtgactccagtgctggagttacctgggccctctgctaccccggtgccagagttgccagggcccctttctaccccagtgcctgagttgccagggccccctgcgacagcagtgcctgagttgccagggccctctgtgacaccagtgccacagttgtcgcaggaattgccagggcttccagcaccatccatggggttggagccaccacaggaggtaccagagccacctgtgatggcacaggagttgccagggctgcctttggtgacagcagcagtagagttgccagagcagcctgcggtaacagtagcaatggagttgaccgaacaacctgtgacgacgacagagttggagcagcctgtggggatgacaacggtggaacatcctgggcatcctgaggtgacaacggcaacagggttgctggggcagcctgaggcaacgatggtgctggagttgccaggacagccagtggcaacgacagcgctggagttgccggggcagccttcggtgactggggtgccagagttgccagggctgccttcggcaactagggcactggagttgtcggggcagcctgtggcaactggggcactagagttgcctgggccgctcatggcagctggggcactggagttctcggggcagtctggggcagctggagcactggagcttttggggcagcctctggcaacaggggtgctggagttgccagggcagcctggggcgccagagttgcctgggcagcctgtggcaactgtggcgctggagatctctgttcagtctgtggtgacaacatcggagctgtcaacgatgaccgtgtcgcagtccctggaggtgccctcgacgacagcgctggaatcctataatacggtagcacaggagctgcctactacattagtgggggagacttctgtaacagtaggagtggatcccttgatggccccagaatcccatatattagcttctaacaccatggagacccatatattagcatccaacaccatggactcccaaatgctagcgtccaacaccatggactcccagatgttagcaactagcactatggactcccagatgttagcaaccagttccatggactcccagatgttagcaaccagctccatggactcccagatgttagcaaccagctccatggactcccagatgttagcaaccagctccatggactcccagatgttagcaaccagcaccatggattctcagatgttagcaaccagcaccatggactcccagatgttagcaactagctcaatggattcccagatgttagcatctggcactatggactctcaaatgttagcttctggcaccatggatgctcagatgttagcgtctggtaccatggatgcccagatgttagcgtctagtacccaagattctgctatgttgggttcaaaatctcctgatccctataggttagctcaggatccttacaggttagctcaggatccctataggttgggccatgacccctatagattaggtcatgatgcttacaggttaggacaagacccttatagattaggccatgatccctacagactaactcctgatccctataggatgtcacctagaccctacaggatagcacccaggtcctatagaatagcacccaggccatataggttagcacctagacccctgatgttagcatctagacgttctatgatgatgtcctatgctgcagaacgttccatgatgtcatcttacgaacgctctatgatgtcttatgagcggtctatgatgtcccctatggctgaacgctctatgatgtcagcctacgagcgctctatgatgtcagcctacgagcgctctatgatgtcccctatggctgagcgctctatgatgtcagcttatgaacgctccatgatgtcagcttatgaacgctccatgatgtccccaatggctgatcgatctatgatgtccatgggtgctgaccggtctatgatgtcgtcatactctgctgctgaccggtctatgatgtcatcgtactctgcagctgaccgatctatgatgtcatcttatactgctgatcgttcaatgatgtctatggctgctgattcttacaccgattcttacactgacacatatacagaggcatatatggtgccacctttgcctcctgaagagcccccaacaatgccaccgttgccacctgaggagccaccaatgacaccaccattgcctcctgaggaaccaccagagggtccagcattgcccactgagcagtcagcattaacagctgaaaatacttggcctacagaggtgccatcattaccatctgaagagtctgtatcgcagcctgagcctcctgtgagtcaaagtgagatttcggagccttcagcagtgcctactgattattcagtgtcagcatcagatccctcagttttagtatcagaggctgctgtgactgttccagaaccaccaccagagccagaatcttcaattacgttaacacctgtagagtctgcagtagtagcagaagaacatgaagttgttccagagagaccagtgacttgtatggtatctgaaactcccgccatgtcagctgaaccaactgtgttagcatcagagcctcctgttatgtcagagacagcagaaacatttgattccatgagagcctcaggacatgttgcctcagaagtatctacatccttgttggttccagcagtaactactccagtgctggcagagagcattctggagccgccagccatggctgccccagagtcttcagctatggctgtcctggagtcttcggctgtgaccgtcctggagtcttcgactgtgactgtcctggagtcttcgactgtaactgtcctggagccttcggttgtgactgtcccggagcctcctgttgtggctgagccagactatgttaccattcctgtgccagttgtttctgcgctggagccttctgtgcctgttctggaaccagcggtgtcagtccttcaaccttctatgattgtttcagaaccatctgtttctgtccaggaatcgactgtgacagtttcagagcctgctgtcacagtctcagagcagactcaagtaataccaactgaggtggctatagagtccacaccaatgatactggaatctagtatcatgtcatcacatgttatgaaaggaattaatctatcctctggtgatcaaaatcttgctccagagattggcatgcaggagattgcattgcattcaggtgaagaaccacatgctgaggaacacctgaaaggtgacttttacgaaagtgaacatggtataaatatagaccttaatataaataatcatttaattgctaaagagatggaacataatacagtgtgtgctgctggtactagtcctgttggggaaattggtgaagagaaaattttgcccaccagtgagactaaacagtgcacagtattggatacctaccctggtgttagtgaagctgatgcaggagaaactctatcttctactggtccttttgctctggaacctgatgcaacaggaactagtaagggtattgaatttaccacagcatctactctcagtttagttaataaatatgatgttgatttatctttaactactcaagatactgaacatgacatggtaatttccaccagtcctagtggtggtagtgaagctgacattgaagggcctttgcctgctaaagatattcatcttgatttaccatctaataataaccttgttagtaaggatacagaagaaccattacctgtaaaagagagtgaccagacattagcagctctgctcagccctaaagaaagtagtggaggagaaaaagaagtacctccccctcctaaagagacactgcctgattcaggattttctgccaatattgaggatattaatgaagcagatttagtgagaccgttacttcctaaggacatggaacgtcttacaagccttagagctggcattgaaggacctttacttgcaagtgatgttggacgtgacagatctgctgccagcccggttgtaagtagtatgccagaaagagcttcagagtcttcttcagaggaaaaagatgattatgaaatttttgtaaaagttaaggacactcacgaaaaaagcaagaaaaataagaaccgtgataagggggagaaagagaagaaaagagactcttcattaagatctcgaagtaagcgttccaaatcttctgaacacaaatcacgcaagcgtaccagtgaatctcgttctagggcaagaaagagatcatctaagtccaagtctcatcgctctcagacacgttcacggtcacgttcaagacgcaggaggagaagcagcagatcaagatcaaagtctagaggaagaagatctgtatcaaaagagaagcgcaaaagatctccaaagcacagatccaagtctagggaaagaaaaagaaaaagatcaagctccagggataaccgaaagacagttagagctcgaagtcgaaccccaagtcgtcggagtcggagtcatactccaagtcgtcgacgaaggtctagatctgtgggtagaagaaggagctttagcatttccccaagccgccgcagccgcacccccagccgccgcagccgcacccccagccgccgcagccgcacccccagccgccgcagccgcacccccagccgccggagccgcacccctagccgtcggagccgcaccccaagccgccggagaagatcaaggtctgtggtaagaagacgaagcttcagtatctcaccagtcagattaaggcgatcaagaacacccttaagaagaaggtttagcagatctcccatccgtcgtaaaagatccaggtcttctgaacgaggcagatcacccaaacgtctgacagatttggataaggctcaattacttgaaatagccaaagctaatgcagctgccatgtgtgctaaggctggtgtccctttaccaccaaacctaaagcctgcacctccacctactatagttgagaaagttgctaaaaagtcaggaggagctactatagaagaactaactgagaaatgtaaacagatcgcacagagtaaagaagatgatgatgtaatagtgaataaacctcatgtttcggatgaagaggaagaagaacctcctttttatcatcatccctttaaactcagtgaatttaaacctatttttttcaatctgaatattgctgcagcaaaaccaactccaccaaaaagccaggtaacattaacaaaagaattccctgtatcatctggatctcaacatcggaaaaaagaagcggatagtgtttatggagaatgggttcctgtggagaaaaatggtgaagaaaacaaagatgatgataatgttttcagcagcaatttgccctcagagcctgtggacatctctacagcaatgagtgaacgggcacttgctcagaaaagactcagtgagaatgcatttgatcttgaagccatgagcatgttaaatagagctcaggaaaggattgatgcctgggctcagctgaactctattcctggccagttcacaggaagtacaggagtacaggttttgacacaagaacagttggccaatactggtgcccaagcctggattaaaaaggatcagttcttaagagcagccccggtaactggaggaatgggagccgttttgatgagaaaaatgggctggagagaaggagaaggattaggaaaaaacaaagaaggcaataaggaacccatcctagttgattttaagacagaccgaaaaggtcttgttgcagtaggagaaagagcacaaaagaggtctgggaacttctctgctgcaatgaaagatctgtcaggcaaacatcctgtgtctgctttgatggagatctgtaataaaagaaggtggcaaccacctgaatttctattggtccatgatagtggccctgatcatcgcaaacattttctctttagggtattgagaaatggaagcccttaccagcccaattgtatgtttttcttgaataggtattgataaatggaagcgcttaccagcccagctttgccagccctaataagaagcatgctaaagccacagcagctactgtggttcttcaagcaatgggccttgtaccaaaggacctcatggctaatgcacttgcttcaggagtgcctcacgtagatagattgaggttttataataatcatttcagaattttactctgcatcacaatgtatttcctctttaatgttgtaaatatttggcaatttaagacattgtgtaaaaagcaatctgtaaaaacatctccaggctttgatttttgtaccatggaaattgtatttaaccatacagggttttggtatgtttatattgtttaccttagtgatgtatttgtttaagtggctaacatccaaacgactgtttgaaggcatcagagtaatcttcagtgtggaatgttaaataacgcttttatactgtattttgtactatgatgtaactccccttccttatggctaggctactgtaacacttgcctgtaatcagtgaagggctgtgcaccttgtactatttcacaatgggttctgctggacagataatgggccagtgttattgaggtgatcaagatctgttccacagggctaatgccaccatctcccctcaaaattttgtagaggttctaaaaagaaagtggtatgttgtgtgatgatcagcactaagtcctgcattcctgttaaagccacttgggtcataagaagggagtaaaaaatgaagtctgactagaattctattggcagaggccaagtacatttagtatggcattgagttgtgatatagttttactttgatgtgcattttgaatttcagctacacctagatagacgtaaaatgataattaaaatgctgtaaccaacttatctaataaaattggcaaccagccactattttgttgactatgagaaagttaaaagtttatgttaatttttagggtctgatagaatatttcatgtgtattacagtggtattcatatgctatgtctctaaactttattttcaaaagcttaaggcccaaatacaaacttctctggaata

SEQ ID NO: 2186 - DNA, 4912 bp, Homo sapiens
attggggtctgctctaagctgcagcaagagaaactgtgtgtgaggggaagaggcctgtttcgctgtcgggtctctagttcttgcacgctctttaagagtctgcactggaggaactcctgccattaccagctcccttcttgcagaagggagggggaaacatacatttattcatgccagtctgttgcatgcaggctttttggcttcctaccttgcaacaaaataattgcaccaactccttagtgccgattccgcccacagagagtcctggagccacagtcttttttgctttgcattgtaggagagggactaagtgctagagactatgtcgctttcctgagctaccgagagcgctcgtgaactggaatcaactgcttcagggaaaaagaaaaaaaaaaaaaaaagacttgcctgggaggccgcgagaaacttgcattggaagcttcagcaaccagcattcgagaaactcctctctactttagcacggtctccagactcagccgagagacagcaaactgcagcgcggtgagagagcgagagagagggagagagagactctccagcctgggaactataactcctctgcgagaggcggagaactccttccccaaatcttttggggacttttctctctttacccacctccgcccctgcgaggagttgaggggccagttcggccgccgcgcgcgtcttcccgttcggcgtgtgcttggcccggggaaccgggagggcccggcgatcgcgcggcggccgccgcgagggtgtgagcgcgcgtgggcgcccgccgagccgaggccatggtgcagcaaaccaacaatgccgagaacacggaagcgctgctggccggcgagagctcggactcgggcgccggcctcgagctgggaatcgcctcctcccccacgcccggctccaccgcctccacgggcggcaaggccgacgacccgagctggtgcaagaccccgagtgggcacatcaagcgacccatgaacgccttcatggtgtggtcgcagatcgagcggcgcaagatcatggagcagtcgcccgacatgcacaacgccgagatctccaagcggctgggcaaacgctggaagctgctcaaagacagcgacaagatccctttcattcgagaggcggagcggctgcgcctcaagcacatggctgactaccccgactacaagtaccggcccaggaagaaggtgaagtccggcaacgccaactccagctcctcggccgccgcctcctccaagccgggggagaagggagacaaggtcggtggcagtggcgggggcggccatgggggcggcggcggcggcgggagcagcaacgcggggggaggaggcggcggtgcgagtggcggcggcgccaactccaaaccggcgcagaaaaagagctgcggctccaaagtggcgggcggcgcgggcggtggggttagcaaaccgcacgccaagctcatcctggcaggcggcggcggcggcgggaaagcagcggctgccgccgccgcctccttcgccgccgaacaggcgggggccgccgccctgctgcccctgggcgccgccgccgaccaccactcgctgtacaaggcgcggactcccagcgcctcggcctccgcctcctcggcagcctcggcctccgcagcgctcgcggccccgggcaagcacctggcggagaagaaggtgaagcgcgtctacctgttcggcggcctgggcacgtcgtcgtcgcccgtgggcggcgtgggcgcgggagccgaccccagcgaccccctgggcctgtacgaggaggagggcgcgggctgctcgcccgacgcgcccagcctgagcggccgcagcagcgccgcctcgtcccccgccgccggccgctcgcccgccgaccaccgcggctacgccagcctgcgcgccgcctcgcccgccccgtccagcgcgccctcgcacgcgtcctcctcggcctcgtcccactcctcctcttcctcctcctcgggctcctcgtcctccgacgacgagttcgaagacgacctgctcgacctgaaccccagctcaaactttgagagcatgtccctgggcagcttcagttcgtcgtcggcgctcgaccgggacctggattttaacttcgagcccggctccggctcgcacttcgagttcccggactactgcacgcccgaggtgagcgagatgatctcgggagactggctcgagtccagcatctccaacctggttttcacctactgaagggcgcgcaggcagggagaagggccggggggggtaggagaggagaaaaaaaaagtgaaaaaaagaaacgaaaaggacagacgaagagtttaaagagaaaagggaaaaaagaaagaaaaagtaagcagggctggcttcgcccgcgttctcgtcgtcggatcaaggagcgcggcggcgttttggacccgcgctcccatcccccaccttcccgggccggggacccactctgcccagccggagggacgcggaggaggaagagggtagacaggggcgacctgtgattgttgttattgatgttgttgttgatggcaaaaaaaaaaaagcgacttcgagtttgctcccctttgcttgaagagaccccctcccccttccaacgagcttccggacttgtctgcacccccagcaagaaggcgagttagttttctagagacttgaaggagtctcccccttcctgcatcaccaccttggttttgttttattttgcttcttggtcaagaaaggaggggagaacccagcgcacccctccccccctttttttaaacgcgtgatgaagacagaaggctccggggtgacgaatttggccgatggcagatgttttgggggaacgccgggactgagagactccacgcaggcgaattcccgtttggggcttttttttcctccctcttttccccttgccccctctgcagccggaggaggagatgttgaggggaggaggccagccagtgtgaccggcgctaggaaatgacccgagaaccccgttggaagcgcagcagcgggagctaggggcgggggcggaggaggacacgaactggaagggggttcacggtcaaactgaaatggatttgcacgttggggagctggcggcggcggctgctgggcctccgccttcttttctacgtgaaatcagtgaggtgagacttcccagaccccggaggcgtggaggagaggagactgtttgatgtggtacaggggcagtcagtggagggcgagtggtttcggaaaaaaaaaaagaaaaaaagaaaaaaaaagaaaaaaaaaagatttttttcttctcttaatcggaatcgtgatggtgttggattatttcaatggtggggttaatatagcatgttatcctgtctatcttttaaagatttctgtataagactgttgagcagtttttaaaatagtgtaggataatataaaaagcagatagatggcgctatgtttgattcctacaacgaaattatcaccagctttttttcattcttaactctttaaaggattcaaacgcaactcaaatctgtgctggactttaaaaaaacaattcaggaccaaattttttctcagtgtgtgtgtttattccttataggtgtaaatgagaagacgtgtttttttccttcaccgatgctccatcctcgtatttctttttccttgtaaatgtaatcagatgccattttatatgtggacgtatttatactggccaaacatattttttcttttgtccctttttttctttcctttctttttacttcctttatttctttattccttccttttcctttttttcttttttttttctttttttttttttttttttggtagttgttgttacccacgccattttacgtctccttcactgaagggctagagttttaacttttaattttttatatttaaatgtagacttttgacacttttaaaaaacaaaaaaagacaagagagatgaaaacgtttgattattttctcagtgtatttttgtaaaaaatatataaagggggtgttaatcggtgtaaatcgctgtttggatttcctgattttataacagggcggctggttaatatctcacacagtttaaaaaatcagcccctaatttctccatgtttacacttcaatctgcaggcttcttaaagtgacagtatcccttaacctgccaccagtgtccaccctccggcccccgtcttgtaaaaaggggaggagaattagccaaacactgtaagcttttaagaaaaacaaagttttaaacgaaatactgctctgtccagaggctttaaaactggtgcaattacagcaaaaagggattctgtagctttaacttgtaaaccacatcttttttgcactttttttataagcaaaaacgtgccgtttaaaccactggatctatctaaatgccgatttgagttcgcgacactatgtactgcgtttttcattcttgtatttgactatttaatcctttctacttgtcgctaaatataattgttttagtcttatggcatgatgatagcatatgtgttcaggtttatagctgttgtgtttaaaaattgaaaaaagtggaaaacatctttgtacatttaagtctgtattataataagcaaaaagattgtgtgtatgtatgtttaatataacatgacaggcactaggacgtctgcctttttaaggcagttccgttaagggtttttgtttttaaacttttttttgccatccatcctgtgcaatatgccgtgtagaatatttgtcttaaaattcaaggccacaaaaacaatgtttgggggaaaaaaaagaaaaaatcatgccagctaatcatgtcaagttcactgcctgtcagattgttgatatataccttctgtaaataactttttttgagaaggaaataaaatcagctggaactgaaccctaaaaaaaaaaaaaaaaaaaaaaaaaaaaaaaaaaaa

SEQ ID NO: 2187 - DNA, 3269 bp, Homo sapiens
cttttcttttcctctttgactgagcaccgaggggcagttggcagcttcacctcagagctgcaggaaggaacggggcagtgaaaatcgaatcgggtgtgatcctaggccaagctcatggcccagcagggccagcaggggcagatggcaagtggagacagcaatctcaacttcaggatggtcgcagagatccagaacgtagagggtcagaacctgcaggagcaggtttgccctgagcccattttcaggttcttcagagaaaacaaggtggagattgcaagtgcaataacaaggccatttcctttccttatgggcctccgagaccgctccttcatctccgagcagatgtatgaacattttcaagaagcttttagaaacctggtcccagtgacaagagtgatgtattgtgtactcagtgaactggagaagacatttggctggtcacatctggaagcattgttcagcaggattaacctgatggcctatcctgatttaaacgagatttacagaagcttccagaatgtatgctatgaacactcacctctccaaatgaataatgtaaacgatttagaagatagacccagattactaccatatggtaaacaagagaacagcaatgcctgtcatgaaatggatgatatagcagtgcctcaggaagccttgagctcctcgccaaggtgtgagccaggtttctcttcagagtcttgtgagcagttagctctcccaaaggctggtggaggagatgctgaagatgcacccagcctactaccaggtgggggagtgtcctgtaaacttgctatacaaatagatgaaggagaatcagaagaaatgcccaagttactgccttatgatacagaagttctagaaagcaacgggatgatagatgcggcaaggacatacagcacagcaccaggggagaaacagggagaggaggaaggcaggaacagtcccagaaaaagaaaccaagacaaggagaagtaccaagagagtccagagggaagagacaaagagacctttgatctaaaaactccccaagtcactaatgaaggagaaccagagaaggggctctgtctactaccaggtgaaggagaagagggcagtgatgactgttcagaaatgtgtgatggagaagagccccaggaagcctctagctccctagcaagatgtgggtcagtttcttgtttctctacagagacctttgatctaaagactccccaagtcactaatgaaggagaaccagagaaggagctcagtctactaccaggtgaaggagaagagggcagtgatgactgttcggaaatgtgtgatggagaagagcgccaggaagcctctagctccctagcaagacgtgggtcagtgtctagtgaactagaaaatcacccaatgaatgaagaaggagaatcagaagagcttgcttctagcctgctatatgataatgtaccaggagcggagcaatcagcatatgaaaatgagaagtgttcctgtgtcatgtgtttctcagaagaggtgccaggaagcccagaagcaaggacggaaagtgatcaagcgtgtggcacaatggatactgtggatattgcaaacaactccactttgggaaaacccaagaggaaaagaagaaaaaagagggggcatggctggagcagaatgagaatgagaaggcagaaaaacagccaacaaaatgataatagcaaagccgacggccaggtggtctccagtgaaaagaaggcgaacgtgaatctgaaagacctttccaagattagggggagaaagagaggcaaacctggaacccgcttcactcagagtgacagagctgcacagaaaagagtccgatcaagagcttcaagaaagcacaaagatgaaactgtggattttaaggctcctttgcttccagtgacctgtggtggggtgaagggaattttacataagaagaaattgcagcaaggaatcttggtgaagtgtatacagactgaggatggaaaatggttcacccccacggaatttgaaatcaaaggaggccatgcaagatcaaagaactggaggctgagtgtgcgctgtggcgggtggcccctacgatggctgatggagaatggatttctgcctgatcctccaagaatacgttacaggaaaaaaaagagaatactgaagtctcaaaacaatagctcagttgacccttgtatgagaaacctggatgagtgtgaggtgtgccgggacggaggggagctgttctgttgcgacacttgttcaagagtcttccatgaggactgtcacatcccgcctgtggaagctgagaggaccccgtggaattgcatcttctgcaggatgaaggagtctccgggaagccaacagtgttgtcaggaatctgaggtcctggagaggcagatgtgtcctgaggaacagttgaaatgtgagttcctcctcttgaaagtctattgctgttctgagagctccttttttgccaagattccatactattattatattagagaggcgtgtcaaggcctgaaggagcccatgtggttggataaaatcaagaaaaggctgaatgagcacggttacccccaagtggaggggtttgtacaagacatgcgcctcatcttccagaaccacagggcctcttacaagtacaaggattttggccaaatgggatttagactggaggctgagtttgagaagaatttcaaggaagtgtttgctattcaggaaacaaatgggaacaattgactggattagtggatgctgaaagcattcagcaaatggcaccctaaaatatgccgctggtttgccactgacttcaaaatgaggtcacttgggcacagcacatgcagggaggggcttttctctgagcctccttcatctgcccaaagacaaatcctcaaaaggaaattcaatcatcatgaatcacaaccccaagtatctcatcagccagggaagagtaagtgggatcacagggaaggatgttggcagcgacaccatcccatacaggctcttacctcttctcctgagggctgctccagacaacatttattacccagaagaccttttgtctgaaaaccagccaagctttattcaggacacacttcttgccttcactttcccacttccgtggccacctccatgcagaagccctaagcccacattctttcgatagctcacggtggtgcatgagtgtccatcatctgactcttctcggagtctcatattttgtgggactcctgtgcaaacatatgttattaaaatttttttcctcctgttaaaaaaaaaaaaaaaaaaaa

SEQ ID NO: 2188 - DNA, 3765 bp, Homo sapiens
gacgagaccctccctcagcacctgcagtgcagccagagccggtgcggcggccgcgacttccccgacgcggggcgctgagaagcactatgaccaccaaagattatccatcattgtggggctttggaacaacaaaaacattcaaaattcccattgaacatctagatttcaaatacattgaaaaatgttcagatgttaaacatctggaaaaaattctttgcgtgctcagatctggtgaggaaggatattatcctgaacttacagaattttgtgaaaagcatcttcaagccttggcccctgaaagcagagctttgaggaaagataaaccagcagcaacagcagccagttttacagctgaagaatgggaaaaaattgatggtgatataaagagttgggtatcagaaattaaaaaagaagaagataaaatgcactttcatgaaactgagacatttccagcaatgaaagataatttgcctccagttcgtggttcaaacagctgtcttcatgtaggcaaggaaaaatattctaaaagaccaactaaaaagaaaactccaagggattacgcggaatgggataaatttgacgtggagaaggaatgtttaaaaattgatgaagattacaaagaaaagacggtaatagacaagtcacacttgtctaaaattgagacaagaatagatacagcaggtctaactgagaaagaaaaggattttcttgccactcgtgaaaaggagaaaggaaatgaagctttcaactcaggagattatgaagaagcagtgatgtattataccaggagcatatcagcgcttcccactgtagttgcctataacaatcgagctcaagcagaaatcaaattacagaactggaatagtgcttttcaggattgtgaaaaggtcttggagttagaacctggaaacgtaaaggctcttctgcgtcgtgctactacatataaacatcaaaacaagctccgggaagctacagaagatttgagtaaagtactagatgttgagcctgataatgatttggccaagaaaaccttgtcagaggttgaaagagatctgaaaaattctgaagctgcatctgagactcaaaccaaagggaaaaggatggttattcaggaaatagaaaactccgaagatgaagaaggaaaaagcggaagaaaacatgaagatggcggtggagataagaagcccgcggagccggcgggagccgcgcgcgccgcccagccgtgcgtcatgggcaacatccagaagaagctgactggcaaagccgaaggcggcaagcggccggcaaggggcgcgccgcagcggggccagaccccggaggccggcgcggacaagcggagcccacggcgggcctctgcggcggcggcggcgggcggcggcgccaccgggcatccgggcggcgggcagggcgcggagaaccctgccggcctgaagagccagggcaacgagctgttccgaagcgggcagttcgccgaggcggccggcaagtactcggcggcaatcgcgctcctggagccagcaggaagtgaaattgcagatgatctaagtatcttatattcaaatagagcagcatgttacctaaaagaaggaaactgcagtggctgcattcaagattgtaacagggctctggaacttcatccattctctatgaaacctcttctgaggcgggcgatggcctatgaaactctagagcagtatgggaaagcttatgtggattataaaacagtgttgcagatagactgtggactccagctagcaaatgacagtgttaacaggctatcaagaattttaatggagctggatggaccaaattggcgggagaagctgtcacctattcctgctgtgcctgcttctgtgccactgcaagcttggcatccggcaaaagagatgatctcaaaacaagcaggagactccagcagccatcgccagcagggcatcacagatgaaaaaacatttaaagcccttaaggaagaaggaaatcaatgtgtaaatgacaaaaactataaagacgccctcagtaaatacagcgaatgcttaaagattaacaataaggaatgtgccatatatacaaacagagctctctgttacttgaagctgtgccagtttgaagaagcaaagcaggactgtgatcaggcacttcagctagctgatgggaacgtgaaagccttctatagacgagctctggctcataaaggactcaagaattatcagaaaagcttaattgatctcaataaagttatcctactagatccaagtattattgaggcaaagatggaactggaagaggtaactagactccttaatcttaaggataagacagcaccattcaacaaagaaaaggagagaaggaaaattgagattcaagaggtgaatgaaggcaaggaggagcctggaagacctgcaggggaggtctccatgggatgccttgcttctgagaagggaggcaaaagcagcaggtcaccagaagaccctgagaaacttccgatagccaagcctaataatgcctatgaatttggtcagattataaatgctctcagtaccaggaaggataaagaagcctgtgcacatcttttagccatcactgcaccaaaagatttgccgatgtttttaagtaacaaacttgaaggggatacattccttctcctcattcagtctctgaaaaataatcttattgaaaaagatccctcattggtgtatcagcatcttttatacctgagtaaagcagaaaggtttaagatgatgttgacactaattagcaagggccaaaaggagctaattgaacagctgtttgaggacctttcggacacaccaaacaaccattttactttagaagatatacaggccctaaaaaggcagtatgagctttaaatcaagataattgttagatttcttccatgcatgtatgtgttccaggaatgttaatgagatggtattgtaaaagagttgcatggataaaacttggcctagaaaagtttggtctgcactataaaacattttacttattttcctacatagaacatgtatattctacaatctgctttttattagttgtaaatattttcttatgtaccagaaccaaataagtatatttagaacttgttaaaaatacattttaatttatgatatacatattattttaattacttgttaaaattttgagttaagttgcatttctttgggctatgaaggagtcctcttaagtttgatagaaatgaatttcttgtaacattcttttttaaaagtggaagtcattaacagtgattattatatcacttatatcctgctaagatacacataaatcccattttgtactagtacctgtggattacagtcagttaaaatgaaatgcaacactgaagtctataacatgaaatgattattaaattgtttattaatttagagctataagaggaacttattttttctaatacggaagcattgcctaataattaagaacaaaaattgccaaaaatttctaccactttttactagattttaaaaagctactttcttttatattgcctatataagcaaaaaaccaaccactgtattaaagcaaactaagcctgcatttatatctgaattattacctccatattttaccaaacatttgaatgtcccccttcccccttttttgttttctgcttttatgactgtatttattcctttactgtaaaagaatatgaagaactcatacatgttgaaagctcctttgttgactgggtcaaagtgaaggaatttcaatctcaaaaaaaaaaaaaaaaaa

SEQ ID NO: 2189 - DNA, 384 bp, Homo sapiens
aagcctgccactgacattgaagaaccaatatatacaatggacaaacaatccagtgccggcggggtgaagaggagcgtcccctgtgattccaacgaggccaacgagatgatgccggagaccccaactggggactcagacccgcaacctgctcctaaaaaaatgaaaacatctgagtcctcgaccatactagtggttcgctacaggaggaactttaaaagaacatctccagaggaactgctgaatgaccacgcccgagagaacagaatcaaccccctccaaatggaggaggaggaattcatggaaataatggttgaaatacctgcaaagtagcaagaagctacatctctcaaccttgggcaatgaaaataaagtttgagaagctga

SEQ ID NO: 2190 - DNA, 384 bp, Homo sapiens; identical to SEQ ID NO: 2189

SEQ ID NO: 2191 - DNA, 425 bp, Homo sapiens
cgaagattcaaaacctacaaaagcctgccgcagacattgaagaaccaatatatacaatggacaaacaatccagtgccggcggggtgaagaggagcgtcccctgtgaatccaacgaggtgaatgagacgatgccggagaccccaactggggactcagacccgcaacctgctcctaaaaaaatgaaaacatctgagtcctcgaccatactagtggttcgctacaggaggaacgtgaaaagaacatctccagaggaactgctgaatgaccacgcccgagagaacagaatcaaccccctccaaatggaggaggaggaattcatggaaataatggttgaaatacctgcaaagtagcaagaagctacatctctcaaccttgggcaatgaaaataaagtttgagaagctgaaaaaaaaaaaaaaaaaaaaaa

SEQ ID NO: 2192 - DNA, 384 bp, Homo sapiens
aagcctgccgctgacattgaagaaccaatatatacaatggacaaacaatccagtgccggcggggtgaagaggagcgtcccctgtgattccaacgaggccaacgagatgatgccggagacctcgagtgggtactcagacccgcaacctgctccgaaaaaactaaaaacatctgagtcctcgaccatactagtggttcgctacaggaggaactttaaaagaacatctccagaggaactggtgaatgaccacgcccgaaagaacagaatcaaccccctccaaatggaggaggaggaattcatggaaataatggttgaaatacctgcaaagtagcaagaagctacatctctcaaccttgggcaatgacaataaagtttgagaagctga

SEQ ID NO: 2193 - DNA, 469 bp, Homo sapiens
gggtatatacagggagggcaagagctccgggccactgcgaagattcaaaacctacaaaagcctgccgctgacattgaagaaccaatatatacaatggacaaacaatccagtgccggcggggtgaagaggagcgtcccctgtgattccaacgaggccaacgagatgatgccggagacctcgagtgggtactcagacccgcaacctgctccgaaaaaactaaaaacatctgagtcctcgaccatactagtggttcgctacaggaggaacgtgaaaagaacatctccagaggaactggtgaatgaccacgcccgagagaacagaatcaaccccctccaaatggaggaggaggaattcatggaaataatggttgaaatacctgcaaagtagcaagaagctacatctctcaaccttgggcaatgaaaataaagtttgagaagctgaaaaaaaaaaaaaaaaaaaaaaaaaaaaa

SEQ ID NO: 2194 - DNA, 1375 bp, Homo sapiens; identical to SEQ ID NO: 18

SEQ ID NO: 2195 - DNA, 1135 bp, Homo sapiens
aaaatgaaaaattgagtttttccgtgaactttatactgtccagctctgttgattttaaagcctcttcatccaggtcagttcaggaagtatatctggagtacctgctctgtttttggctgtgagactagcactaaggattctggtacctttacccaaacctactgggctactaatacttctctcagcagttgatcaaatacaatagaccatgtaagctggggccgctcatccacttccagtttgctggtctccctgctagaaaacacattgtactgtgctttttctggaattcagtataatggcatcactgcctgtttttcacatcttttgtttcctgttcattttaaggaaacctactaaatccagttaatattaaatggacaccactcattaagaaatttctttatggcttctgctgaatacttaaatgccttactacagttatccagttgacatgtttttaattcatataaggtatattgggtatattgaagtatatattgtattacaaagacttgttcttgtattttaaaatgtcagtgcaaaaaatatatggtggaacctttctttaaagttgaaatgcagtattatttaaatctgaaaggttaaaaagctttcttcaccttatatatgttcttccactgtgactttttagttgaagactagtaaattaacttttagttagaagatgcctactgcttttgttgtttattttaatcagcagagcacagagacacataaaaactctgggaaatgactaggataaaaatatcagtatgtatctgttttagatattttgagttttgctttttttatgccttgaatattttatttcaaaaagtatctgaagcaaattctcagactgaactacttcttagacctcactgtaagaatattttattcaatgtctcatttatgatagatttgcaagctgctcatttttgaacagctttttgcatgggataggagcatgtctattctaacacatcagcttattcaaaagcaagaattttaaaaataagataaatgtaaagttgttttataaacgatcctgttaattaaaccacagacaccatatatccttctgcatcctttggccaataaaagttgctggagaaccaaaaaaaaaaaaaaa

SEQ ID NO: 2196 - DNA, 3012 bp, Homo sapiens
cgactgactagccgggcgataacggcagagagcatagagcgcaggaacaagcgcaacgtccaagagggaagggccagcacgtcgggggcctctctggccctacccaggccgtgttctcgatagctttccggaagaaagggatctgggagcgagatgcgtgtagctagcacgatgcgtcgcgcggtgacgctctggcccgacgccgacggcctctcagtggctcccggaggacccggcgggcccagtgttggagagctgaaggtcaggccaggacagtgagacctgactccttgctcctaccagcctactatggcttaagacccagggccagggtcccgttgatgtaacagagcagaggaccagcagatgaatggacaccttgaagcagaggagcagcaggaccagaggccagaccaggagctgaccgggagctggggccacgggcctaggagcaccctggtcagggctaaggccatggccccgcccccaccgccactggctgccagcaccccgctcctccatggcgagtttggctcctacccagcccgaggcccacgctttgccctcacccttacatcgcaggccctgcacatacagcggctgcgccccaaacctgaagccaggccccggggtggcctggtcccgttggccgaggtctcaggctgctgcaccctgcgaagccgcagcccctcagactcagcggcctacttctgcatctacacctaccctcggggccggcgcggggcccggcgcagagccactcgcaccttccgggcagatggggccgccacctacgaagagaaccgtgccgaggcccagcgctgggccactgccctcacctgtctgctccgaggactgccactgcccggggatggggagatcacccctgacctgctacctcggccgccccggttgcttctattggtcaatccctttgggggtcggggcctggcctggcagtggtgtaagaaccacgtgcttcccatgatctctgaagctgggctgtccttcaacctcatccagacagaacgacagaaccacgcccgggagctggtccaggggctgagcctgagtgagtgggatggcatcgtcacggtctcgggagacgggctgctccatgaggtgctgaacgggctcctagatcgccctgactgggaggaagctgtgaagatgcctgtgggcatcctcccctgcggctcgggcaacgcgctggccggagcagtgaaccagcacgggggatttgagccagccctgggcctcgacctgttgctcaactgctcactgttgctgtgccggggtggtggccacccactggacctgctctccgtgacgctggcctcgggctcccgctgtttctccttcctgtctgtggcctggggcttcgtgtcagatgtggatatccagagcgagcgcttcagggccttgggcagtgcccgcttcacactgggcacggtgctgggcctcgccacactgcacacctaccgcggacgcctctcctacctccccgccactgtggaacctgcctcgcccacccctgcccatagcctgcctcgtgccaagtcggagctgaccctaaccccagacccagccccgcccatggcccactcacccctgcatcgttctgtgtctgacctgcctcttcccctgccccagcctgccctggcctctcctggctcgccagaacccctgcccatcctgtccctcaacggtgggggcccagagctggctggggactggggtggggctggggatgctccgctgtccccggacccactgctgtcttcacctcctggctctcccaaggcagctctacactcacccgtctccgaaggggcccccgtaattcccccatcctctgggctcccacttcccacccctgatgcccgggtaggggcctccacctgcggcccgcccgaccacctgctgcctccgctgggcaccccgctgcccccagactgggtgacgctggagggggactttgtgctcatgttggccatctcgcccagccacctaggcgctgacctggtggcagctccgcatgcgcgcttcgacgacggcctggtgcacctgtgctgggtgcgtagcggcatctcgcgggctgcgctgctgcgccttttcttggccatggagcgtggtagccacttcagcctgggctgtccgcagctgggctacgccgcggcccgtgccttccgcctagagccgctcacaccacgcggcgtgctcacagtggacggggagcaggtggagtatgggccgctacaggcacagatgcaccctggcatcggtacactgctcactgggcctcctggctgcccggggcgggagccctgaaactaaacaagcttggtacccgccgggggcggggcctacattccaatggggcggagcctgagctagggggtgtggcctggctgctagagttgtggtggcaggggccctggccccgtctcaggattgcgctcgctttcatgggaccagacgtgatgctggaaggtgggcgtcgtcacggttaaagagaaatgggctcgtcccgagggtagtgcctgatcaatgagggcggggcctggcgtctgatctggggccgcccttacggggcagggctcagtcctgacgcttgccacctgctcctacccggccaggatggctgagggcggagtctattttacgcgtcgcccaatgacaggacctggaatgtactggctggggtaggcctcagtgagtcggccggtcagggcccgcagcctcgccccatccactccggtgcctccatttagctggccaatcagcccaggaggggcaggttccccggggccggcgctaggatttgcactaatgttcctctccccgcgggtgggggcggggaaattcatatcccctgttcgtctcatgcgcgtcctccgtccccaatctaaaaagcaattgaaaaggtctatgcaataaaggcagtcgcttcattcctctcaaaaaaaaaaaaaaaaaaaaaaaaaaaaaaaaaaaaaaaaaaaaaaaaaa

SEQ ID NO: 2197 - DNA, 619 bp, Homo sapiens
acaccggggcaggcaaagtgcagatgtaggagctgctgaggagcagttcttagttttggtgccatcaaccaggccagtacttcctaaaatgggactctcaggacttctgccaatcctggtaccattcatccttttgggggacatccaggaacctgggcacgctgaaggcatccttggcaagccgtgtcccaaaatcaaagtggaatgcgaagtggaagaaatagaccagtgtaccaaacccagagattgcccagaaaacatgaagtgttgcccgttcagccgtggaaagaaatgtttagacttcagaaaggtcagccttactttataccataaggaggagcttgaataacctccaggatttggctcataatccaggcctctctccacgtgtgcctgattgatgctccaaattggcttccacgggccaaaccttggctgttccagaaactgaaccccaggaattgcttacacactttcttccagcgtagcatctcttcaaacacaatgctcttccccttgaccacttctcagtatgaaactctatgtcttcaactttcagaccccccatttatttgtatgaaggcttcagttgccttaataaagtgctctgtggggtccg

SEQ ID NO: 2198 - DNA, 2983 bp, Homo sapiens
ggggaggaggccgcgcggggtggggtctggcggtacgcgctggctgcgtcgacgtgctgacgccatgacgccccggctggtgtgtgtcggtgtgtatgtgtgtgtgtgagtgtgcgcgctccgagtgtgtgtgtatttgtgtatcggcggtcccgcaggtcccggatgttgcggacagtatgaggcaagcgcagggggacggggaccagcagctgtcgccgccgctctcaggctctgggaaccacccttctactttctgtctctaggaatttcactactctagggtgaagagggaacagaaatctttgccccctgactttggaaatctcgtttaaccttcaaactggcgatgtcaagggttccaagtcctccacctccggcagaaatgtcgagtggccccgtagctgagagttggtgctacacacagatcaaggtagtgaaattctcctacatgtggaccatcaataactttagcttttgccgggaggaaatgggtgaagtcattaaaagttctacattttcatcaggagcaaatgataaactgaaatggtgtttgcgagtaaaccccaaagggttagatgaagaaagcaaagattacctgtcactttacctgttactggtcagctgtccaaagagtgaagttcgggcaaaattcaaattctccatcctgaatgccaagggagaagaaaccaaagctatggagagtcaacgggcatataggtttgtgcaaggcaaagactggggattcaagaaattcatccgtagagattttcttttggatgaggccaacgggcttctccctgatgacaagcttaccctcttctgcgaggtgagtgttgtgcaagattctgtcaacatttctggccagaataccatgaacatggtaaaggttcctgagtgccggctggcagatgagttaggaggactgtgggagaattcccggttcacagactgctgcttgtgtgttgccggccaggaattccaggctcacaaggctatcttagcagctcgttctccggtttttagtgccatgtttgaacatgaaatggaggagagcaaaaagaatcgagttgaaatcaatgatgtggagcctgaagtttttaaggaaatgatgtgcttcatttacacggggaaggctccaaacctcgacaaaatggctgatgatttgctggcagctgctgacaagtatgccctggagcgcttaaaggtcatgtgtgaggatgccctctgcagtaacctgtccgtggagaacgctgcagaaattctcatcctggccgacctccacagtgcagatcagttgaaaactcaggcagtggatttcatcaactatcatgcttcggatgtcttggagacctctgggtggaagtcaatggtggtgtcacatccccacttggtggctgaggcataccgctctctggcttcagcacagtgcccttttctgggacccccacgcaaacgcctgaagcaatcctaagatcctgcttgttgtaagactccgtttaatttccagaagcagcagccactgttgctgccactgaccaccaggtagacagcgcaatctgtggagcttttactctgttgtgaggggaagagactgcattgtggccccagacttttaaaacagcactaaataacttgggggaaacggggggagggaaaatgaaatgaaaaccctgttgctgcgtcactgtgttccctttggcctggctgagtttgatactgtggggattcagtttaggcgctggcccgaggatatcccagcggtggtacttcggagacacctgtctgcatctgactgagcagaacaaatcgtcaggtgcctggagcaaaaaggaaaaaaaaaaaagaaaggacattgagttttaacagaagggaaaaggaaagaagaaaagatttttgcagaatttctcaaaaatcagtttgtggattccagtagtatttatattgagagaaacaaattttagtccttctaactgtgctaaaacttggatatttgtgaaaactccttaccaccatacaagcatcagaagagctctcttgttgttagcacttattgtttgcaagaacagaatacatccttttatccttttatgaaaaatgacaagtgaaggcaaaaggggaaggttatttgatctggaagatgagtgttctgatgtggtggcttttgcaaaaatctttattggtgttgaaaactggaaaaaataactcatccagaattcatattgtcttgacaagaactatggttctctgtttttagatattgtggaaaatgtttttgggcatttttctctgattttatttcttctcccccacccctttttctaaaaaacaaacaaaaaaaaaaacacacaaaacaaaaacagaacaaaagaagagagaaggaaattttatcaattaaaaatgctgtgtgataaaatcccagcccagattgctcagctgtttgtacctgacttgccgcctgcataggagccagttctgttccttctgactagcccctcttcctccaggggagaacttccaaatgttaatttttttttttttgaaaatataaataattactattttgtactgtgtggtatctctggtcttttgtttcactcacctgccttgtctcttgggtctgagtcccttgcttaagggattttgaagtcctagttttcagcttgcagagattatgtctgaaatgcctaatgagtcgcagggatttgttgagactccgtaatctcaagttctctttgtgagctatcagcatctgccagtctcttgtcctccctgagtatctcacagtccatatcctgatgagggatcaggcccctacctctgccaaggcaagtaatggtagtgggcttttaaactgccccccgtatgttttaagacctaatccccacctcccttcttctaactaaatataaaaagatccaggggacataaatgtggagattaaataaagggaaattattgtctctaaaaaaaaaaaaaaaaa

SEQ ID NO: 2199 - DNA, 2010 bp, Homo sapiens
aagaggaagtcgcgctgctgtggcggccgctgtagcagcggcggtccagtcgtagcccggccgcccgcgcctgtccggtccggtccggccacggaggcagcgcagcggcgggactccgagcctaccccgccgagtgagctgcgccgcaccgtgccgtcccacccggcacccaccagtccgatggggccgcagcggcggctgtcccctgccggggccgccctactctggggcttcctgctccagctgacagccgctcaggaagcaatcttgcatgcgtctggaaatggcacaaccaaggactactgcatgctttataacccttattggacagctcttccaagtaccctagaaaatgcaacttccattagtttgatgaatctgacttccacaccactatgcaacctttctgatattcctcctgttggcataaagagcaaagcagttgtggttccatggggaagctgccattttcttgaaaaagccagaattgcacagaaaggaggtgctgaagcaatgttagttgtcaataacagtgtcctatttcctccctcaggtaacagatctgaatttcctgatgtgaaaatactgattgcatttataagctacaaagactttagagatatgaaccagactctaggagataacattactgtgaaaatgtattctccatcgtggcctaactttgattatactatggtggttatttttgtaattgcggtgttcactgtggcattaggtggatactggagtggactagttgaattggaaaacttgaaagcagtgacaactgaagatagagaaatgaggaaaaagaaggaagaatatttaacttttagtcctcttacagttgtaatatttgtggtcatctgctgtgttatgatggtcttactttatttcttctacaaatggttggtttatgttatgatagcaattttctgcatagcatcagcaatgagtctgtacaactgtcttgctgcactaattcataagataccatatggacaatgcacgattgcatgtcgtggcaaaaacatggaagtgagacttatttttctctctggactgtgcatagcagtagctgttgtttgggctgtgtttcgaaatgaagacaggtgggcttggattttacaggatatcttggggattgctttctgtctgaatttaattaaaacactgaagttgcccaacttcaagtcatgtgtgatacttctaggccttctcctcctctatgatgtattttttgttttcataacaccattcatcacaaagaatggtgagagtatcatggttgaactcgcagctggaccttttggaaataatgaaaagttgccagtagtcatcagagtaccaaaactgatctatttctcagtaatgagtgtgtgcctcatgcctgtttcaatattgggttttggagacattattgtaccaggcctgttgattgcatactgtagaagatttgatgttcagactggttcttcttacatatactatgtttcgtctacagttgcctatgctattggcatgatacttacatttgttgttctggtgctgatgaaaaaggggcaacctgctctcctctatttagtaccttgcacacttattactgcctcagttgttgcctggagacgtaaggaaatgaaaaagttctggaaaggtaacagctatcagatgatggaccatttggattgtgcaacaaatgaagaaaaccctgtgatatctggtgaacagattgtccagcaataatattatgtggaactgctataatgtgtcattgattttctacaaatagacttcgactttttaaattgacttttgaattgacaatctgaaagagtcttcaatgatatgcttgcaaaaatatatttttatgagctggtactgacagttacatcataaataactaaaacgctttgcttttaatgttaaagttgtgccttcacattaaataaaacatatggtctgtgtagtttccgagatgtactatatacagtatatttttctaaaaaaaaa

SEQ ID NO: 2200 - DNA, 1466 bp, Homo sapiens
cgcctcctgcctggtctcgggtgccagcgccgccggcggagaacaggagcatggagggcgggctggggcgtgctgtgtgcttgctgaccggggcctcccgcggcttcggccggacgctggccccgctcctggcctcgctgctgtcgcccggctccgtgcttgtccttagcgcccgcaacgacgaggcactgcgccagctggaggccgagctgggcgccgagcggtctggcctgcgcgtggtgcgggtgcccgccgacctgggcgccgaggccggcttgcagcagctgctcggcgccctgcgcgagctcccccggcccaaggggctgcagcgactgctgcttatcaacaacgcgggctctcttggggatgtgtccaaaggcttcgtggacctgagtgactccactcaagtgaacaactactgggcactgaacttgacctccatgctctgcctgacttccagcgtcctgaaggccttcccggacagtcctggcctcaacagaaccgtggttaacatctcgtccctctgtgccctgcaacctttcaaaggctgggcgctgtactgtgcaggaaaggctgctcgtgatatgctgttccaggtcctggcgctggaggaacctaatgtgagggtgctgaactatgccccaggtcctctggacacagacatgcagcagttggcccgggagacctccgtggacccagacatgcgaaaagggctgcaggagctgaaggcaaaggggaagctggtggattgcaaggtgtcagcccagaaactgctgagcttactggaaaaggacgagttcaagtctggagcccacgtggacttctatgacaaataagcccatgtttttggcttcctgaacctttttgcccccacttttagacataccccagagccctgtggctccccacaccctgccataggggcagtcctgccttacacatagaagcattcatgcctgctgccctgccctcaggcacagccagctgtgagctcccaggtcattggccttaccagttgtcaggagtctgtgctgtgcaccctgggttataaggaggcttaggagagaggttatgggtattggtgtctctatccccaggaatagaacttaaggggtgggaagaacaggaaaagaagctggaacacagaagagaggaggttgtgtctcttgctcatagcaagcctgtgggtagaggaaagagtgatctggtgtcgaataggaggacccatgtagattcgcagatggcctggatgggaggaagggcagacggtacatgtcccagcccacatagatgccccttgctgagggtagcaggaccttctgttgaactttgtgtcctcactctgatgtctccttccttcagaatctaccacccctcccccaggctgggagaaggggctcctgggtgtctgtatacacgccaaaggcagatacaaataaaatacagattgtcctttcttaaaaaaa

SEQ ID NO: 2201 - DNA, 7909 bp, Homo sapiens
gccactacccgctgcggagtgaacggtgtggagcggaggccgcggaggctcctcggtccttcagcacccctcggcccgacgcacccacgcccctcaccccccgagagccgaaaatggacccaagtggggtcaaagtgctggaaacagcagaggacatccaggagaggcggcagcaggtcctagaccgataccaccgcttcaaggaactctcaacccttaggcgtcagaagctggaagattcctatcgattccagttctttcaaagagatgctgaagagctggagaaatggatacaggaaaaacttcagattgcatctgatgagaattataaagacccaaccaacttgcagggaaagcttcagaagcatcaagcatttgaagctgaagtgcaggccaactcaggagccattgttaagctggatgaaactggaaacctgatgatctcagaagggcattttgcatctgaaaccatacggacccgtttgatggagctgcaccgccagtgggaattacttttggagaagatgcgagaaaaaggaatcaaactgctgcaggcccagaagttggtgcagtacttacgagaatgtgaggacgtgatggactggatcaatgacaaggaagcaattgttacttctgaagagctgggccaggatctggagcatgtagaggttttacagaagaaatttgaagagtttcaaacagatatggctgctcatgaagaaagagttaatgaagtgaaccagtttgctgccaaactcatacaggagcagcaccctgaggaggaactgatcaagactaagcaggatgaagtcaatgcagcctggcagcggctgaagggcctggctctgcagaggcaggggaagctctttggggcagcagaagttcagcgctttaacagggatgtggatgagactatcagttggattaaggaaaaggagcagttaatggcctctgatgattttggccgagacctggcaagtgttcaggctctgcttcggaagcacgagggtctggagagagatcttgctgctctagaagacaaggtcaaagccctgtgtgctgaggctgaccgcctgcaacagtcccaccctctgagtgcaacacagattcaagtgaagcgagaggaactgattacaaactgggagcagatccgcaccttggcggcagagagacatgcacggctcaatgattcatacaggcttcaacgcttccttgctgacttccgtgacctcaccagctgggtgactgagatgaaagccctcatcaatgcagatgagcttgccagtgatgtggctggggctgaagccctgctagatagacaccaagagcacaagggtgaaattgatgcccatgaagacagcttcaaatctgcagatgaatctggacaggcactgcttgctgctggtcactatgcctcagatgaagtgagggagaagctgaccgtcctttccgaggagagagcggcgctgctggagctgtgggagctgcgcaggcagcagtacgagcagtgcatggacctgcagctcttctaccgggacactgagcaggtggacaactggatgagcaagcaggaggcgttcctgttgaatgaagacttgggagattccttggatagtgtggaagcgcttcttaagaagcacgaagactttgagaaatcccttagtgcccaggaggaaaagattacagcattagatgaatttgcaaccaagctaattcagaacaaccactatgcaatggaagatgtggccactcgccgagatgctctgttgagccgccgcaatgcccttcacgagagagccatgcgtcgccgggcccagctagccgattctttccatctgcagcagtttttccgtgattctgatgagctcaagagttgggtcaatgagaagatgaaaactgccacagatgaagcttataaagatccatccaacctacaaggaaaagtacagaagcatcaggcttttgaggctgagctctcagcaaaccagagccgaattgatgccttggagaaagctggccaaaagctgattgatgtcaaccactatgccaaggatgaagtggcagctcgtatgaatgaggtgatcagtttgtggaagaaactgctagaggccactgaactgaaaggaataaagcttcgtgaagccaaccagcaacagcaatttaatcgcaatgttgaggatattgaattgtggctatatgaagtagaaggtcacttggcttcggatgattacggcaaagatcttaccaatgtgcagaacctccagaagaaacatgccctgctagaggcagatgtggctgctcaccaggaccgaattgatggcatcaccattcaggcccgccagttccaagatgctggccattttgatgcagaaaacatcaagaagaaacaggaagccctcgtggctcgctatgaggcactcaaggagcccatggttgcccggaagcagaagctggccgattctctgcggttgcagcagctcttccgggatgttgaggatgaggagacgtggattcgagagaaagagcccattgccgcatctaccaacagaggtaaggatttaattggggtccagaatctgctaaagaaacatcaagccttacaagcagaaattgctggacatgaaccacgcatcaaagcagttacacagaaggggaatgccatggtggaggaaggccattttgctgcagaggatgtgaaggccaagcttcacgagctgaaccaaaagtgggaggcactgaaagccaaagcttcccagcgtcggcaggacctggaggactctctgcaggcccagcagtactttgctgatgctaacgaggctgaatcctggatgcgggagaaggaacccattgtgggcagcactgactatggcaaggacgaagactctgctgaggctctactgaagaaacacgaagctttgatgtcagatctcagtgcctacggcagcagcatccaggctttgcgagaacaagcacagtcctgccggcaacaagtggcccccacggatgatgagactgggaaggagctggtcttggctctctacgactatcaggagaagagtccccgagaggtcaccatgaagaagggagatatccttaccttactcaacagcaccaacaaggattggtggaaagtggaagtgaacgatcgtcagggttttgtgccggctgcgtacgtgaagaaattggaccccgcccagtcagcctcccgggagaatctcctggaggagcaaggcagcatagcactgcggcaggagcagattgacaatcagacacgcataactaaggaggccggcagtgtatctctgcgtatgaagcaggtggaagaactatatcattctctgctggaactgggtgagaagcgtaaaggcatgttggagaagagttgcaagaagtttatgttgttccgtgaagcgaatgaactacagcaatggatcaatgagaaggaagccgctctgacaagtgaggaggtcggagcagacttggagcaggttgaggtgctccagaagaagtttgatgacttccagaaggacctgaaggccaatgagtcacggttgaaggacattaacaaggtagctgaagacctggagtctgaaggtctcatggcagaggaggtgcaggctgtgcaacaacaggaagtgtatggcatgatgcccagggatgaaactgattccaagacagcctccccgtggaagtctgctcgtctgatggttcacaccgtggccacctttaattccatcaaggagctgaatgagcgctggcggtccctacagcagctggccgaggaacggagccagctcttgggcagcgcccatgaagtacagaggttccacagagatgctgatgaaaccaaagaatggattgaagagaagaatcaagctctaaacacagacaattatggacatgatctcgccagtgtccaggccctgcaacgcaagcatgagggcttcgagagggaccttgcggctctcggtgacaaggtaaactcccttggtgaaacagcagagcgcctgatccagtcccatcccgagtcagcagaagacctgcaggaaaagtgcacagagttaaaccaggcctggagcagcctggggaaacgtgcagatcagcgcaaggcaaagttgggtgactcccacgacctgcagcgcttccttagcgatttccgggacctcatgtcttggatcaatggaatacgggggttggtgtcctcagatgagctagccaaggatgtcaccggagctgaggcattgctggagcgacaccaggaacaccggacagaaatcgatgccagggctggcactttccaggcatttgagcagtttggacagcagctgttggctcacggacactatgccagccctgagatcaagcagaaacttgatattcttgaccaggagcgtgcagacctggagaaggcctgggttcagcgcaggatgatgctggatcagtgccttgaactgcagctgttccatcgggactgtgagcaagctgagaactggatggctgcccgggaggccttcttgaataccgaagacaaaggagactcactggacagcgtagaggctctgatcaaaaaacatgaagactttgacaaagcgattaacgtccaggaagagaagattgctgctctgcaggcctttgccgaccagctcatcgctgccggccattatgccaagggagacatttctagccggcgcaatgaggtcttggacaggtggcgacgtctgaaagcccagatgattgagaaaaggtcaaagctaggagaatctcaaaccctccaacagttcagccgggatgtggatgagattgaggcttggatcagtgaaaaattgcaaacagcgagtgatgagtcgtacaaggatcccaccaacatccagagcaagcaccagaagcaccaggcttttgaagcagagctgcatgccaacgctgaccggatccgtggggttatcgacatgggcaactccctcattgaacgtggagcctgtgccggcagtgaggatgctgtcaaggcccgcctggctgccttagctgaccagtggcagttcttggtgcaaaagtcagcggaaaagagccagaaactgaaagaagccaacaagcagcagaacttcaacacagggatcaaggactttgacttctggctgtctgaggtggaggccctgctggcatccgaagattatggcaaagacctggcttctgtgaacaacctgctgaaaaagcatcaactgctggaagcagatatatctgcccatgaggatcgcctgaaggacctgaacagccaggcagacagcctgatgaccagcagtgccttcgacacctcccaagtaaaggacaagagggacaccatcaacgggcgcttccagaagatcaagagcatggcggcctcccggcgagccaagctgaatgaatcccatcgcctgcaccagttcttccgggacatggatgacgaggagtcctggatcaaggagaagaagctgctggtgggctcagaggactacggccgggacctaaccggcgtgcagaacctgaggaagaagcacaagcggctggaagcagaactggctgcgcatgagccggctattcagggtgtcctggacactggcaagaagctgtccgatgacaacaccatcgggaaagaggagatccagcagcggctggcgcagtttgtggagcactggaaagagctgaagcagctggcagctgcccggggtcagcggctggaagagtccttggaatatcagcagtttgtagccaatgtggaagaggaagaagcctggatcaatgagaaaatgaccctggtggccagcgaagattatggcgacactcttgccgccatccagggcttactgaagaaacatgaagcttttgagacagacttcaccgtccacaaggatcgcgtgaatgatgtctgcaccaatggacaagacctcattaagaagaacaatcaccatgaggagaacatctcttcaaagatgaagggcctgaacgggaaagtgtcagacctggagaaagctgcagcccagagaaaggcgaagctggatgagaactcggccttccttcagttcaactggaaggcggacgtggtggagtcctggatcggtgaaaaggagaacagcttgaagacagatgattatggccgagacctgtcttctgtgcagacgctcctcaccaaacaggaaacttttgacgctgggctgcaggccttccagcaggaaggcattgccaacatcactgccctcaaagatcagcttctcgccgccaaacacgttcagtccaaggccatcgaggcccggcacgcctccctcatgaagaggtggagccagcttctggccaactcagccgcccgcaagaagaagcttctggaggctcagagtcacttccgcaaggtggaggacctcttcctgaccttcgccaaaaaggcttctgccttcaacagctggtttgaaaatgcagaggaggacttaacagaccccgtgcgctgcaactccttggaagaaatcaaagctttgcgcgaggcccacgacgccttccgctcctccctcagctctgcccaggctgacttcaaccagctggccgagctggaccgccagatcaagagcttccgcgtagcctccaacccctacacctggtttaccatggaggccctggaggagacctggaggaacctacagaaaatcatcaaggagagggagctggagctgcagaaggaacagcggcggcaggaggagaacgacaagctgcgccaggagtttgcccagcacgccaacgccttccaccagtggatccaagagaccaggacatacctcctcgatgggtcctgtatggtggaagagtcggggaccctcgaatcccagcttgaagctaccaaacgcaagcaccaggaaatccgagccatgagaagtcagctcaaaaagatcgaggacctgggggccgccatggaggaggccctcatcctggacaacaagtacacggagcacagcaccgtgggcctcgcccagcagtgggaccagctggaccagctgggcatgcgcatgcagcacaacctggagcagcagatccaggccaggaacacaacaggtgtgactgaggaggccctcaaagaattcagcatgatgtttaaacactttgacaaggacaagtctggcaggctgaaccatcaggagttcaaatcttgcctgcgctccctgggctatgacctgcccatggtggaggaaggggaacctgaccctgagttcgaggcaatcctggacacggtggatccgaacagagatggccatgtctccttgcaagaatacatggctttcatgatcagccgcgaaactgagaacgtcaagtccagcgaggagattgagagcgccttccgggccctcagctcagagggaaagccttacgtgaccaaggaggagctctaccagaacctgacccgggaacaagccgactactgcgtctcccacatgaagccctacgtggacggcaagggccgcgagctccccaccgcgttcgactacgtggagttcacccgctcgcttttcgtgaactgagccactccctgggtcacccacccctcgctgcttgccctgcgtcgccttgctgcatgtccgctcctctgtgtgctctcactttccactgtaaccttaagcctgcttagcttggaataagacttaggagaaaatggtgcttcactaacccgcttccggtccagtcacaatcatcatgtcactgtggggacccagatctgtgtcttgaagcagctgccctcattccgacttcagaaaatcgaagcagctggctcctccccttgttctctctcccaccctcccccaaatctgttttcatgtaaaagacaaataaatgatgacttcccccaaaaaaaaaaaaaaaaaaaaaaaaaaaaaaaaaaaaaaaaaaaaaaaaaaaa

SEQ ID NO: 2202 - DNA, 1682 bp, Homo sapiens
gaaggtttttgctgcgccaacgcagtgaccgaaggctccgctcacgcccggcctgatcctgcctgaagatggtgccactggtggctgtggtatcagggccccgtgcccagctctttgcctgcctgctcaggctgggcactcagcaggtcggcccccttcagctgcacaccggggccagccatgcggccaggaaccattatgaggtgctggtgctgggtgggggcagtggcggaatcaccatggctgcccgcatgaagaggaaagtgggtgcagagaatgtggccattgttgagcccagtgagagacatttctaccagccaatctggacactggtgggtgctggtgccaaacaattgtcctcatctggtcgtcccacggcaagtgtgattccatctggtgtagaatggatcaaagctagagtgactgagttgaacccagacaagaactgcattcacacagatgacgacgagaagatctcctaccgatatcttattattgctctcggaatccagctggactatgagaagattaaaggcctacctgaaggtttcgctcatcccaaaatagggtcgaattattcagttaagactgtagagaagacatggaaagctctgcaggacttcaaagagggcaatgccatcttcaccttcccaaatactccagtgaagtgtgctggagcccctcagaagatcatgtacttatcagaagcctacttcaggaagacagggaagcgatccaaggccaatatcattttcaacacttctcttggagccattttcggggttaagaagtatgcagatgccctgcaggagatcatccaggagcggaacctcactgttaactacaagaaaaacctcattgaagtccgagccgataaacaagaggctgtatttgagaacctggacaaaccaggagagacccaagtgatttcatatgaaatgcttcatgtcacacctccaatgagcccaccagatgtcctcaagaccagtcctgtggctgatgctgctggttgggtggatgtggataaagaaactctgcaacacaggaggtacccaaatgtgtttgggattggggactgcaccaaccttcctacgtcaaagaccgctgctgcagtagctgcccagtcaggaatacttgataggacaatttctgtaattatgaagaatcaaacaccaacaaagaagtatgatggctacacatcatgtccactggtgaccggctacaaccgtgtgattcttgctgagtttgactacaaagcagagccgctagaaaccttcccctttgatcaaagcaaagagcgcctttccatgtatctcatgaaagctgacctgatgcctttcctgtattggaatatgatgctaaggggttactggggaggaccagcgtttctgcgcaagttgtttcatctaggtatgagttaaggatggctcagcacttgctcatcttggatggcttctgggccaaaactgcagtcactgaatgaccaagagcagcacgaaggacttggaacctatccttgtaaagagttccttgatgggtaatggtgaccaaatgcctcccttttcagtacctttgaacagcaaccatgtgggctactcatgatgggcttgattctttgggaataataaaatgaaataatacttttattttctgaataaaagtttgtcactgaaaaaaaaaaa

SEQ ID NO: 2203 - DNA, 2270 bp, Homo sapiens
aggctgagaccggtgcgccgcgcgctagtggccgctcttccgcgggctagcgggcggtgggggcgccagcagcgcggaaggcgggcacgcgggccatggctccctgggcggaggccgagcactcggcgctgaacccgctgcgcgcggtgtggctcacgctgaccgccgccttcctgctgaccctactgctgcagctcctgccgcccggcctgctcccgggctgcgcgatcttccaggacctgatccgctatgggaaaaccaagtgtggggagccgtcgcgccccgccgcctgccgagcctttgatgtccccaagagatatttttcccacttttatatcatctcagtgctgtggaatggcttcctgctttggtgccttactcaatctctgttcctgggagcaccttttccaagctggcttcatggtttgctcagaattctcggggcggcacagttccagggaggggagctggcactgtctgcattcttagtgctagtatttctgtggctgcacagcttacgaagactcttcgagtgcctctacgtcagtgtcttctccaatgtcatgattcacgtcgtgcagtactgttttggacttgtctattatgtccttgttggcctaactgtgctgagccaagtgccaatggatggcaggaatgcctacataacagggaaaaatctattgatgcaagcacggtggttccatattcttgggatgatgatgttcatctggtcatctgcccatcagtataagtgccatgttattctcggcaatctcaggaaaaataaagcaggagtggtcattcactgtaaccacaggatcccatttggagactggtttgaatatgtttcttcccctaactacttagcagagctgatgatctacgtttccatggccgtcacctttgggttccacaacttaacttggtggctagtggtgacaaatgtcttctttaatcaggccctgtctgcctttctcagccaccaattctacaaaagcaaatttgtctcttacccgaagcataggaaagctttcctaccatttttgttttaagttaacctcagtcatgaagaatgcaaaccaggtgatggtttcaatgcctaaggacagtgaagtctggagcccaaagtacagtttcagcaaagctgtttgaaactctccattccatttctataccccacaagttttcactgaatgagcatggcagtgccactcaagaaaatgaatctccaaagtatcttcaaagaataaatactaatggcagatctgcgatttctgggtccactttctgagatgctttctaaaaccaaccaactgataaaaagtagatgagacttctccaagctgcttcacaagcaaactaaccgaaaaactgaaaatatacaaacagcttcacacacacacacacacacacacacacacacacacacacaaaggaagatcatcaatggctgcggtagcctagtaggaatggactatataataatatagcaggtgctcaataactgtttgttgcatttcagtaaaagcagaataacctttcaaaataataacaggctgggtgcaatggctcacacctgttaatcccagcacttcgggaggccaaggtgggcagttcgcttgggcccaagagttcgagaccagcctgggcaacatggtgaaaccctatctccgtgaaaaaatatgaaaattagccaagagtggtggcacatgcctgtagtcccagatacttgggagtgggctgggatgggagaatcgcttgagcccaggaggtcaagggtacagtgagccgaggtcatgccactgcactccagcctggcctgggcaacagagcaagaccctgtctcaaaataataataatatataattttacaccaaaagtttcaggaaaaaacgagtttgttggagttagtttatactttcacatatcaccacaaagatctccagttaaataactatcaatatccatttccattcatctccccctcaaatcatagcctaacagaacactttgaaagctcttttatttaatatttttttacatcctttgaagggagtgcttcaaaaatgaaagcatcagaagataaaatatttttatatttatgcatagcaagccttcatgaacggaagtgacacactctggattgaataatactgtagcctcattcatatgtagttattcaaattggattaatgtctgtgtgagtttatttgaactagcagaaagtatctgaagatattcaggaatagagtttatacttaaaatagctt

SEQ ID NO: 2204 - DNA, 8798 bp, Homo sapiens
cggagcttaagcgttgcagcaggaaaacttccatctcgctctcctggctttgatcctcactggacatcagaccagaggcaccgaagggagggaggatgcgagatgaccggccctttggcaacctgaccatcgacttagcagagccttcaaaagcaagccaggggctggctgcacgaccaaagaggcgccgcgcctctcgtggatgtgtgtgtgtgagtgatccagcgagtgtgtgtgcgtgtgagggtgtgtgtgtgtatgcctgtgtgcacagcacaactgtgtgcgtgtcccggtgagtgtgcctgtgcatgcgtgagtgtgtgtacgtgtgcatgtgtgtgtgagtgcgcttggttattactattattattatttttggaagaaaaatctttgaaaatctggggcaggttactgtgctcctagggtgattcttcttttgcaagaggagctgaccagggcaagctactagagccatttctcggcaagtaaagagatttttccttccagaaggagaaggatttttctccctgctctgcagccaagtgaaagagattagtccctaaacctgtgaaatcgaccagagctgtgtgattaccagggcttgagagaggactcgaaaagaaaaggagaaataaatcaaacagcctgtcagttcctttggccacgtcagaagatgtcatctcaaactaagttcaagaaagacaaagagatcattgctgaatatgaagcccaaataaaagagatccgcacgcagctggtggagcagttcaaatgtctggagcagcaatcagagtcgcgactgcagctgcttcaagacctccaggagtttttccgccggaaagctgagattgagctcgagtactcccgcagcctggagaagctggctgagcgcttctcctccaaaatccgcagctcccgggagcaccagttcaagaaggaccagtacctcctctcgcctgtgaactgttggtatctggttctgcatcagacccggcgggagagccgagaccatgccaccctcaatgacatcttcatgaacaatgtcatcgtccgcctctcccagatcagtgaggatgtcatcagactcttcaaaaagagcaaggagattggcctgcagatgcacgaggagctcctgaaggtgaccaatgagctctacacagtcatgaaaacctaccacatgtaccatgcagagagcatcagtgcggaaagcaagctgaaggaggctgagaagcaggaggagaagcagttcaataagtcaggagacctcagcatgaacctgctccggcacgaggaccggccccagcgccgcagctctgtgaagaagattgagaagatgaaggagaagaggcaggccaagtactctgagaacaagctgaaatgcacaaaggcccggaatgactacttgctcaatctggcagccaccaacgcagctataagcaaatactacatccatgatgtctctgatctgatcgattgctgtgatttgggcttccatgccagcctggcccgcaccttccggacctatctctcagctgaatacaacctggagacctctcgccacgaagggctggatgtcattgagaatgcagtggacaacctggattcccgaagtgacaagcacacagtcatggacatgtgcaatcaagtcttctgccctccactcaagttcgagttccagccccacatgggggatgaggtctgccaggtcagcgctcagcagcccgtccagacagaactgctcatgcgttatcaccagctgcagtccagactggccaccctcaagatagagaatgaggaggttaggaaaaccctggatgccaccatgcagacattacaggacatgctgactgtggaggactttgatgtctccgatgccttccaacacagtcgatcgacagagtccgtcaagtcggctgcctctgagacctacatgagcaagatcaacattgccaagaggagagccaaccagcaggaaacagaaatgttttattttacaaaatttaaagagtatgtgaatggcagtaacctcatcaccaagctgcaggccaagcacgatttactcaagcagaccctgggcgaaggggaaagagcagaatgcggcaccaccaggattcaggacaagctataccgcttgtagtcgagagctgcatccgttacatcaatttatatggactccagcagcaggggatcttcagagtgccaggatctcaggtggaagtcaatgacatcaaaaattcctttgagagaggtgaagacccccttgtggacgatcaaaatgaacgagatatcaattcagtcgctggtgttttaaaactgtatttccgaggactggaaaacccactctttcctaaggaaaggtttcaagatttgatatctactattaaactggagaacccagccgagagggtgcaccagatccaacaaatcctcgtcacccttccccgcgtggtcattgtggtcatgagatacctcttcgctttcctcaaccacctctcccagtatagcgacgagaacatgatggatccctacaacctggccatctgcttcgggcctaccctcatgcacatccctgatgggcaggaccctgtgtcctgccaggcacacatcaatgaagtcatcaaaaccatcatcatccatcatgaagccatcttccccagcccccgggagctagagggacctgtgtatgaaaaatgcatggctggaggggaagaatattgtgacagcccacacagcgagccaggggccatcgatgaagttgaccatgacaatggcactgagcctcataccagcgatgaagaagtggagcagatcgaggctattgccaagtttgactacatggggcggtccccgcgtgagctatccttcaagaagggggcctcgctgctcctgtaccaccgcgcctcggaggactggtgggagggccggcacaacggcgtggatggactcatcccccatcagtacatagttgtacaggacatggatgatgccttctccgacagcctgagccagaaggctgacagcgaggccagcagtgggccattgctggatgacaaggcctcttccaaaaacgacctccagtcccccacggagcacatctcggattacggctttgggggggtgatgggccgagtgcggttacgatctgatggagcagccatccccagacgccgaagcgggggcgacacacacagcccgccccggggcctgggccccagcatagacacaccaccccgggctgctgcctgccccagcagcccccacaaaatccccctcacccgggggaggatcgagagccctgagaagcggaggatggcgacgttcgggagcgctggcagcatcaactaccctgacaagaaggcgctctccgaagggcactcgatgaggtcgacctgcggttccaccaggcacagcagcctaggggaccacaagtccctggaggccgaggccctggcagaagacatcgagaagaccatgagcacggctctgcacgagttgcgggaactcgagaggcagaacacggtcaagcaggcgccagatgtggtgctggacaccctggagcccctgaagaacccgccaggccccgtcagctcggagcccgccagtccccttcacaccatcgtcatccgcgaccccgatgccgccatgcgccgcagcagcagctcctccaccgagatgatgaccaccttcaagccagccctgtccgcccgcctggctggcgcccagctccgcccgccccccatgcggcccgtgcggccggtggtccagcaccggtccagcagcagcagcagctcgggcgtgggcagcccggccgtgacgcccaccgagaagatgttccccaacagctcagcggacaagtcgggcaccatgtgacctgcaggatgggccgcgccgccgtggcccgctgtggctcaccacggcccagggtggccttggtggcttccacgtgcttcccagtgaccctggccttggagggcagaggtccgtctgggagggtgtgtctgtgcagagctgaggcccgggcgctggctgcagctcacgtccagccatgggaatcccacggacctctcgcgtgtcaacagacgaccagaggagtgctggagctccagcagccccaaccacagcattccctaacatggaggcaaaataccacatggcttctcccgcatatcgtcactggaaacttcctctctcgacattctctctacatacgtatatgtgtgtgtatatcgatgtgtgcatatatacacatgtatacgtatgtacgtgtctgtaggtgtgtgtatatatatatatatttatgcatctatatacatatactagatctggacacacgcatactaagtgtatatagtatctcctttttctttttatgaaacttagatttacctcagatccatgccaccaaacatctcccaccgagttatttggtgggatttgcagggacttttctgggagaacttaaaggcccatagtaactgcgaatgaagcaatataccactaacctgcagaaaaacacaaacaaaaacagactcccactgtctccagaagtcgtggccttccagaacagtctgcccctcaaggaagggtggggcaggcagtacccccaagcaggctgctcccagaggtggggaacccttcataggaaatccccacccccgtccaccccagagaccctgcccttccacccggaggccaaaggccaactgtactcccaaaggcatgggagaaggttggcgagaagacccctgactaccacatccttgtgtttgtgtgtagagacgggggatagtgagaacctaagccccatcgtagcacagtattacatgtggttgggaaaaataaaaatacagtggtgtggaatactccaaaacctagaaatgctgtaggaataaatctgtggtaactatagaggtttaacttatatcattttcaaactatttaattttttcttttcctggttctactaattatactgtgtcagatttggaactaaacaggcaaggaggctttgagtcacatcgttttcattttaaatcaggctgtgatgcactgtggctggtgccgtcttgcatgaaacgcatgagccgtgagcgcccagttcagactggggccagggaggggcagtccttggcactttctgtcctagaggacactgtcagttgagttaatacaagtgacatagcttcccttccctcccccttcacccactccctccagaacatttagtgtagatgaaaatgtggtgatagaaatgggtgcatgatcttcacgtgtgacagccaggcctttgcctcttggccaagtaaagcccttccgggtcgctctccttcgattccattttacctcctcttctgatcacttccagagatgagctgtttctggataatggcacacgggcaaatctgtgtgccctgtgggccgctgttacttaccctctcctgcgagacccaggggcttttccctactgttcccacgcttcctctctctcgaggccactgaagtttggagtcaaaaggcccagagtctgagtcccagccctgagcacttaggagccttctgacttagggtttgtcactccacctcattgagcctgactgttctgctccataaaatagggtaataaaggtcaaacatcagtgagcaagctgtgtacactggaaaacactgaatcaatacaatgcgtttgtgattatcattagtaaggtaagtcttagatcagagccctccagcccttctttttgaaacctcccaatggcatttcagaagtgagcagtggaattttcctgccatcctaataagagccctggattccatcattaacatttcagcccattggatgaagtggtgccctctcctctggtcccccgcgaaaaggtaaatacacccaaagggagggacctagttaagtcactggcacctagataagttaggagggtaaagccactacctcgtctgaaggactggacttgacaccccacagtggaagggagcatcaggagaggaacaaaaaaagggatctcagggagaggccagtgtcaaacttgacctcccttgtttggcctagaatgaacccttctctttagctcctggatatgaaaggccatctgcttggagcacagaaagatattgccattttacagcttaagagagtaaggccttgggctgtgctgtgacctgcccaagatttgacactggctaggagcagaggctgcgtcaggctcttaaagtcatgtgtttgcatgctggatgctatactgtccagccaggacacaagacttctgatttctaccctcaagatactcccagatcctaaatccagtagcctcccaggcaaaatatagcaatctgccacaactgccagatgaaaagcaacaatcagagtagaaaaatctgttgcctgatatacataacaccaatcagaccgtgtggatttttctctgaattgactgattttgtttttttcttactgaaaatggacctgcctttcactgaattttctgagggcagagtcttagctgttttctttaagcaccttttttttttttttccattgggaaatggctgatgagttcacatttagggatgtacacacacagatggcagacgtctccccactcatccagccccagatctgagccttgacgcaggccaagtggaaaaatactttcccgcccccctcccctgttcccacttcctcatctggcactatgcatgtctcactcaccctccacagcactcagtcccatcgacgttcactgaacattggctttctctttctgactcctgcctgttttagtccactatatattgctgtatttgcttaaatgctggaaagtaactgttaaaatgtgaaattgtaatttttaaaaaggctacaattaaattttagccaatgccactcaccaaatctttgcacctagtagatagatcaatgtaaaaacaaatacctaactgtacagtgagtgtgggggaaatgtagtaacctagttagtagtcttcaatataaccaattgtacaaggggaagtggtgtttacctacttgttcatcaccattattgaaagccgtactgatcagttagttgacaacgggcatttttttttctttgcttcatggaatgatttcttttcttaaccttcgacttatcctgaggtcaagccttttgtctttatgtgtaaccgacgttcagtctattctaggaatgaaccagcaagttgttcatttaaaactgaccaaagacaattaattcctggtctagtttcctgggccttgtggctcagctgccactaaagagctttttggataaaattgagaacaagctgtgcttcctaccccactctccccgtccccttttattcccttttcctcttaaagagctgctctgagctgtgggattctatgaaaaattcttgcctttccttgtttcagtgctaacgatttctcacctcgaagcgccttttgaaccccggacagagtgcacaatcggagggaattgcgagcttgggaattagactttggagtcttttctctgaagtcaccaggccaggggtcaggagagagatggattcccaagggatgaaaggtttctattcaatgaagaaatcggagtgggaagagacacagggaaattgagccatattttggctatcggctggaaccagcagttcagagatctgccttataaacatttaaaaccggtttgtggtacacaaagaggaaccagtgtgggaaggggcctttatgtggggctttcttctctgttggagtcccttggagtgccttgttgggtatatttctctgtcattcaggaggcacgaatgtggaggacttctcgtgacctggtcgtgatgtggcattcagtgcatgtccacagctaatggaaaaacacgaggactcgggtaatggttcttcctctcagtctttctattcctaacttttcacacatccagatggttccacactagtgcaaatgcctcactctcctgagaaacccagaaagaagagtggctggctcacaaccatggggttagcccctgctgggctgggagtcggggtggcggccaggaggaaaggcagaaaggggtgagccgaggtgttgcctagctgattttctgctgtgcagagctaatgctgacatttcatgtcaacttccccggttctctggggtctcctctcctctgagcagccacatagaacattccccacatatccaaagctgcccaggggagccgagagaagggactttgctgtcaggtccaagccctcctgacctccctgagattgatctgccagtgtcctgctgtccctctgggactggccacatggccatcgctgccccttgttgacacctcctttctgtgtgagttgtccccggccaataacaaagctgttccttgaaccagaacaaccagagtgcacttttccttccttagacggaagtagatcctggctagggtttctgcccaggcccttgttcccggcagtgtgactgtttacatggtttggcaataggtttgattctgattgcttcagagtggctggtctattttgtttcctttggtttccttcctccccaaattgtgacaggaaaaacagaccaaaaccaccctaggaaattgctggttgcctgtccccacgtgatgataaatgttgccctcttctggatatcgtttctctaccttacgaccaaacgcccgtcctatagagtgtctgattggatcctctgtcgcgtattctgatggtgcctgctggtttgacgtggagctatcctgtgaaataaaacagcttaacttttctc

SEQ ID NO: 2205 - DNA, 1238 bp, Homo sapiens
cggcggagctggtcccgttgtgctgcggcgccgcgcggcctgcagtcccgggcccgcgccccgcgccgcccgcccgcccgccatggagcccggccccgacggccccgccgcctccggccccgccgccatccgcgagggctggttccgcgagacctgcagcctgtggcccggccaggccctgtcgctgcaggtggagcagctgctccaccaccggcgctcgcgctaccaggacatcctcgtcttccgcagtaagacctatggcaacgtgctggtgttggacggtgtcatccagtgcacggagagagacgagttctcctaccaggagatgatcgccaacctgcctctctgcagccaccccaacccgcgaaaggtgctgatcatcgggggcggagatggaggtgtcctgcgggaggtggtgaagcacccctccgtggagtccgtggtccagtgtgagatcgacgaggatgtcatccaagtctccaagaagttcctgccaggcatggccattggctactctagctcgaaggtgaccctacatgtgggtgacggttttgagttcatgaaacagaatcaggatgccttcgacgtgatcatcactgactcctcagaccccatgggccccgccgaaagtctcttcaaggagtcctattaccagctcatgaagacagccctcaaggaagatggtgtcctctgctgccagggcgagtgcgagtggctgcacctggacctcatcaaggagatgcggcagttctgccagtccctgttccccgtggtggcctatgcctactgcaccatccccacctaccccagcggccagatcggcttcatgctgtgcagcaagaacccgagcacgaacttccaggagccggtgcagccgctgacacagcagcaggtggcgcagatgcagctgaagtactacaactccgacgtgcaccgcgccgcctttgtgctgcccgagtttgcccgcaaggccctgaatgatgtgagctgagcccaggcgccaccactgatgccacccaggacctcggaccttggagcctgcggggtgcctcggcccctccagccccgggccggacctcctgctggctctcgcccaccaaccaagtgttacaagccccagaatgctgcccggcctgccctgctgggcggactgtctgtgtgtctgtctctctggcgttccacctccaagcctataccagctgtgtacagcgccatctctctgccttctgttgcccccg

SEQ ID NO: 2206 - DNA, 1700 bp, Homo sapiens
gcggtgcaccctgggatagggagcgatctccaagcgaggcggcaagatggactcaggattcttccaccgatcaagtgcagaacagtataatcggttcagcaacaaacagaagaaactactgaagcagctgaaatttgcagaatgcctagaaaaaaaggtggacacgagcaaagtaaatttggaagttataaagccttggataacaaaaagagtaacaaaaatccttgggtttgaagatgatgttgtgattgagtttatattcaaccagctgtaagtgaagaatccagactccaaaatgatgcaaatcaacctgaatggattttcgaatggaaaaaatgctcgagaatttacgggagaactatggcccctgctgctaagtgcacaagaaaacatctcgggaatctcttctgctttcctagaactgaagaaagaagaaataaaacaaagacagattgaataagaaaaattggcgtctatgaaaaagcaagatgaagacaaagataaaaggcataagttagaaaaagaaagcagcagagaaaaaagggagaggtctcgtagcccaagaagaaccaagggccagagtccttttcctgctccagaaaagaaggaaaaaactccagagctcccagaaccttcagtgaaagtaaaagaaccttcagtacaacaggccacttctactagtgacattctgaaagtttccaaacctgaacctgtaccagagcctaaagaaccttctccggaaaaaaattccaaaaaagaaaagcagaagaagacccgaccacgatctcagtcacactccaaatcaaaatctcagatgcggtccccactgtccttctcacactccacctaggcggtgcaccctgggatagggagcgatctccaagcgaggcggcaagatggactcaggattcttccaccgatcaagtgcagaacagtataatcggttcagcaacaaacagaagaaactactgaagcagctgaaatttgcagaatgcctagaaaaaaaggtggacacgagcaaagtaaatttggaagttataaagccttggataacaaaaagagtaacaaaaatccttgggtttgaagatgatgttgtgattgagtttatattcaaccagctgtaagtgaagaatccagactccaaaatgatgcaaatcaacctgaatggattttcgaatggaaaaaatgctcgagaatttacgggagaactatggcccctgctgctaagtgcacaagaaaacatctcgggaatctcttctgctttcctagaactgaagaaagaagaaataaaacaaagacagattgaataagaaaaattggcgtctatgaaaaagcaagatgaagacaaagataaaaggcataagttagaaaaagaaagcagcagagaaaaaagggagaggtctcgtagcccaagaagaaccaagggccagagtccttttcctgctccagaaaagaaggaaaaaactccagagctcccagaaccttcagtgaaagtaaaagaaccttcagtacaacaggccacttctactagtgacattctgaaagtttccaaacctgaacctgtaccagagcctaaagaaccttctccggaaaaaaattccaaaaaagaaaagcagaagaagacccgaccacgatctcagtcacactccaaatcaaaatctcagatgcggtccccactgtccttctcacactccacctag

SEQ ID NO: 2207 - DNA, 3990 bp, Homo sapiens
ggagtttagggcctgacagaagcccgcccccgctggcgctcgtgcgcacgcgtggcgggctctcggcgcactgagcaggcgcggcctcgtgtcggccggagggggcgggcgcaacgacgcgcgctgcgtcccggcgctcggctttccctccgccggtcccgccctccgtcgcggcggcgcggtgtaccctgggatagggagcgatctccgagcgaggcggcaagatggacgcgggatttttccgcggaacaagtgcagaacaggataatcggttcagcaacaaacagaagaaactactgaagcagctgaaatttgcagaatgcctagaaaaaaaggtggacatgagcaaagtaaatttggaggttataaagccttggataacaaaaagagtaacggaaatccttgggtttgaagatgatgttgtgattgagtttatattcaaccagctggaagtgaagaatccagactccaaaatgatgcaaatcaacctgactggatttttgaatggaaaaaatgctcgagaatttatgggagaactgtggcccctgctgctaagtgcacaagaaaacatcgcgggaatcccttctgctttcctagaactgaagaaagaagaaataaaacaaagacagattgaacaagaaaaactggcatctatgaaaaagcaagatgaagacaaagataaaagagataaggaagaaaaagaaagcagcagagaaaaaagggagcggtctcgtagcccaagaagacgcaaatccagatctccttcccctagaagacgatcttcccctgtcaggagagagagaaagcgcagtcattctcgatctccccgtcacagaaccaagagccggagtccttcccctgctccagaaaagaaggaaaaaactccagagctcccagaaccttcagtgaaagtaaaagaaccttcagtacaagaggctacttctactagtgacattctgaaagttcccaaacctgaacctataccagagcctaaagaaccttctccggaaaaaaattccaaaaaagaaaaggagaaggagaagacccgaccacgatctcggtcacgctccaaatcaagatcccggacgcggtcccgctctccttctcacactcgacctagacggcgccatagatcccgatcaagatcgtattcacctagaaggcggccaagcccaagaaggcggccatctcctcgaagaagaactccgccaagaagaatgcctcctccaccaaggcatagaaggagtagatctccagtaagacgaagaagacgttcgtcagcatccttgtctgggagtagctcatcatcctcttcatctcgttcacggtcaccaccaaagaagcctcccaagaggacatccagcccccctcggaaaactcgtaggttatctccttcagcaagtcctccaaggcgaaggcacaggccatcacctcctgcaactccaccacccaaaactcggcattcccctacaccccagcagtcaaaccgtacaagaaaaagtcgtgtttctgtgtctccagggagaacttcaggtaaagtgacaaaacataaaggtactgagaaaagagaatccccttcaccagcaccgaagcctagaaaagtagagttatctgaatcggaagaagataaaggtggcaaaatggctgcagcagattctgtgcagcagagacgccaatacagacgacaaaaccagcagtcttcatctgactctggctcctcctcctcctcagaagatgaacgacccaagagatcccatgtgaagaatggtgaggttggcaggcggcggagacattccccttcccggagtgcttctccatcaccacgaaagcgccaaaaagagacttcccctcgtggtagacggaggagaagtccatccccaccacccaccagaaggcgacggtctccttctcccgcccctcctcctcgacggcgcaggactcccacaccaccaccacgacgaaggactccttctcctcccccacgtcggcgctcaccttctcctagaagatactctcctccaatacagaggagatactctccttctccacctccaaagagaagaacggcttcacctcctccccctcctaaacgaagagcatcaccatctccaccaccaaagcggcgggtctcccattctccacctcccaaacaaagaagctccccagtcaccaagagacgttcaccttcattatcatccaagcataggaaagggtcttccccaagccgctctacccgggaggcccgatcaccacaaccaaacaaacggcattcgccctcaccacggcctcgagctcctcagacctcctcaagtcctccacccgttcgaagaggagcgtcgtcatcaccccaaagaaggcagtccccgtctccaagtactaggcccattaggagagtctccaggactccggaacctaaaaagataaaaaaggctgcttccccaagcccacagtctgtaagaagggtctcatcctcccgatctgtctccgggtctcctgagccagcagctaaaaagcccccagcacctccatcccccgtccagtctcagtcaccgtctacaaactggtcaccagctgtaccggtcaaaaaggccaaaagcccaacaccgagcccatcaccgccaagaaattcagatcaggaaggaggtggaaagaaaaagaagaaaaagaaggacaagaaacacaaaaaggataagaagcacaagaagcacaaaaaacacaagaaggaaaaggctgtggctgcagctgctgcagctgctgtgacccctgcagccattgcagctgccacaaccacattagcacaggaagagccagtggcagcgccagagccgaagaaggagactgaaagtgaagctgaagataaccttgatgatttagaaaagcacctgcgtgaaaaggccctgagatcaatgaggaaggcccaagtgtccccacagtcttagggggaaatgtttgttatgatgtaaattttatttggtttgtacgcagttcaatttcaaaattgctaaaatgtgtttgagctttagactataacatttgttgtaataattgctaggttgaagttcaacatgtaaaaaaagggggcatggatttacattgcaaaaggtgtccacagtgtattagtgacattctttcattgacagctgacataattcattgagtgaaatattttaagccaaaaaaaaattccctttttaaaaaagggggtttaaatactgttggcatttttatggttcctttaaatgccctagctattcccagaggggtttttttgtttgtttttttggttttgattttctttttgtttttctttcttcttcttatttttttcatttgagtcttagctcccatttaagttatgcttctgaccttgtatggtctgtaagcttgcccagaaataagaccactgttttgaactaccacaaaagtataaatgaatattttaatgccacaatctttcctgttgcctgtggagtctctgctgaaatgaatcaggattcgagctctaggatgagacagaaaatgaaagcatgttgtttgccaggacactgtgggtttatattgatgtgtaacaagttgatttggaacactggactctcattctgttattctggttttgttttttttgttttgttttttttcttttgtaaaggcaatgagctagtcccagaaaggatccttcagttacatacaatttgtttaatgaaatgtcatggctctgttcatatttttgtcttgttcttccaattggtatatacaactttcagagcctcttgtatttggaaggctggaagggcccagactttggaatagtgtcttggtttcactgtttttgttttgattttttttttgttttgattttttttaaactaaagctatataaagcttgtggattaaacagaataaatttctaaatttaaaaatttaaaaaaaaaaaaaaaaaaaaaaaaaaaaaaaaaaaaaaaaaaaaaaaaaggaaaaaaaaaaaaaaaa

SEQ ID NO: 2208 - DNA, 9379 bp, Homo sapiens
agaatgctctgcatcgacagcgggagacgagacgcgctcgggcgtcgctttgctgccgctaggccctgtgctcctccccgcagcggaaggcctacgaatacgcggtgtcttacgtcgcttcctccgttcttcgttgcactggccaacgggacgcttagtctttcggcaacggggtgaaaccttccttgtgcctgaaaaaacggtacttcgcggtgtggcttcggcgcctgcgcaaaaggccgcggggcgcactccagttcccggcaggccccgcgacgcgcgtttgcgtgctgacgcacgcagttagtcgtgctgacgtgcagcgcggcccaggcggggtgcgagtggcgcagttggagcccgttgcggcccctgaggaagcgaggaggcgtcggcgtcggctgaggcgggcggaccggcgaggcgaggcggcggccccaggcccgagggactcgggagctcgagcagcggcggcggcaagacctctccccctcggaggcggcgggcggaggcggcgggagcggtggtgccccccccgggcacggggccatgtacaacgggatcgggctgccgacgccccggggcagcggcaccaacggctacgtccagcgcaacctgtccctggtgcggggccgccggggtgagcggcctgactacaagggagaggaggaactgcggcgcctggaggctgccctggtgaagcggcctaatcctgacatcctggaccacgagcgcaagcggcgcgtcgagctgcgatgcctcgagctggaggagatgatggaagagcaggggtacgaggaacagcaaattcaggaaaaagtggcgacctttcgactcatgttgctggagaaggatgtgaaccctgggggcaaggaggagaccccagggcagaggccagcggtcacggagactcaccagttggcagaattaaatgagaagaagaatgaaagactccgtgctgcctttggcatcagtgattcttacgtagatggcagctcttttgatcctcagcgtcgtgcccgagaagctaaacaaccagctcctgagcctcccaaaccttacagccttgttcgggagtctagcagttctcgctcaccaaccccaaagcagaagaagaagaaaaagaagaaagatagaggacgcaggtcagagagcagctctcctcgacgggagagaaagaaaagctcaaagaagaagaagcacaggtcagaatctgagtccaagaaacgtaagcataggtctcccactccaaagagcaaacgtaaatctaaggacaaaaagcgaaagcggtctcgaagtacaacaccagcccccaagagccgccgggcccaccgttcaacttctgctgactctgcttcctcctccgatacttcccgcagtcggtctcgaagtgctgcagctaaaactcatacaactgccttggctgggcgaagtccttcccctgcttcagggcgacgcggggagggagatgcgcctttcagtgaaccaggtactaccagcacacaacggcctagtagcccggagactgctacgaaacagcctagcagcccttatgaagacaaagataaagacaagaaggagaaatctgcaactcgacctagcccctctccggaaaggagcagcacaggcccagaaccacctgctcccactccgctccttgctgagcgacatggcggctccccacaaccccttgcaaccacccccttaagccaggagccagtgaaccccccatctgaggcctctccaactcgggaccgttcaccacctaagtctcccgagaaacttccccagtcttcttcctcagagagcagcccaccatcccctcaacctaccaaagtttctcggcatgccagctcttccccagaaagtcctaaacctgctccagctccagggtcccaccgagagatttcttcttctcccacatctaagaatcgctcacatggccgagcaaaacgggataaatcacattctcataccccctcccgtaggatggggaggtcccgtagccctgccaccgctaagagagggcgatctcggtctcgaacccctaccaagagaggtcattctcgatcccgatctccccagtggcgtaggtccaggtctgcacagaggtggggaagatctagaagcccccagcgacgtggccgctctaggtctcctcagcgaccaggctggtctaggagcagaaatacccagagaagaggcaggtctaggtcagcaaggcgagggaggtcccactctagatccccagccactaggggtagatctcgttctagaacaccagcccgccggggcaggtcccgctctagaacacctgccaggcggagatcacgatccagaactcccaccaggcgtaggtctcggtctagaacaccagcccggaggggcaggtctcggtctagaacacctgctaggcgcagatctaggacccgatcaccagtacgacgcaggtctcgtagtagatcaccagccaggagaagtggcaggtcacgctctagaaccccagctagacgtggccgctcacgctccagaaccccagccagacgtggccgctcacgctctagaaccccagctagacgcagtggtcgctcacgctccagaacaccagccaggagagggaggtctcggtctaggacaccaagacgaggaagatcccgcagtagaagcttagttagacgtggaagatctcactctagaacacctcaaagaagaggcagatctggctcatcttcagagcggaaaaacaaatccagaacatctcaaagaagaagcaggtccaattcaagcccagaaatgaagaaatctcgcatttcttcaaggcggagcaggtctctctcttcaccacggtccaaagcaaaatctcgcttgtctttgaggcgcagcctttcagggtcttccccatgccctaaacaaaagtcacagacaccacccaggcgcagtcgctctggatcctcccaacctaaagctaaatctagaacgccacccagacgcagtcgctccagttcttctccgccacctaaacagaaatctaagacaccatcaagacaaagtcattccagttcatctcctcatcctaaagtgaaatctggaacaccaccgaggcaagggtccataacaagtccccaggccaatgagcaatctgtaacgccacagagacggagctgttttgaatcatcacctgaccctgagttgaaatctaggaccccttctagacatagctgctcagggtcctctcctcctagagtgaaatctagcacacctcccagacagagcccatctaggtcatcatctccacaacccaaagtgaaggcaataatatcaccaagacaaagaagccattctggctcctcttctccaagtcctagtagggtgacgtcgagaacaactccacggcgaagcagatcagtatctccctgctccaatgtggaatccagattgttgccaagatacagtcattctgggtcctcctcaccagataccaaagtgaaacctgaaacaccgccaagacaaagtcactcagggtctatttcaccataccccaaagtaaaggcccaaactccaccggggccaagtctttctggatcaaagtcaccatgtccccaagagaagtctaaagactcactagttcaaagttgccctggatccctctctctctgtgcaggagtaaaatctagcacaccaccaggcgagagctattttggtgtctcatctctgcaactgaaaggacaatctcaaacttcaccagaccacagatctgatacttcaagtccagaagtgagacagagtcattcagaatcaccatctctgcagagcaaatctcaaacatcacctaagggaggtcggtccaggtcttcatctccagtcactgagctggcatccagatctccaataagacaagatagaggtgagttctcagcgagtcctatgttgaaatctggaatgtctcctgagcagagcaggttccagtctgactcttcttcatatcctacagtggactcgaattctctcttggggcagagtagattggagactgctgaatcaaaagagaaaatggccttaccccctcaggaggatgctactgcatcacctcctagacagaaagacaaatttagtccctttccagtacaggataggcctgagtcttcactggtattcaaagacacacttagaaccccgccaagggaaagaagtggtgctgggtcatctccagaaacaaaagagcaaaatagtgcattgcctacgtcaagccaagatgaagagttaatggaggtggtagagaagtctgaagaacccgcaggccaaatcctgtctcatttgtcttcagaacttaaagaaatgtccacaagtaactttgaatcatctcctgaagtagaagaaaggcctgctgtgtctttgactcttgatcagagccagtcacaggcttctttggaagcagtagaagtcccttcaatggcctcatcttggggtgggccacatttttctccagaacataaagaactgtctaactccccactcagggagaacagctttggatcacctttagaatttagaaactcaggcccacttggtacagaaatgaatactggattttcttctgaggttaaagaagatttgaatggaccgtttcttaatcagctggaaacagatccatctctagacatgaaagaacaatcgacaagatcctctggacacagcagttctgagttatccccagatgcagtggaaaaggcagggatgtcttcaaatcagagcatctcttcacctgtgcttgatgctgtacccagaacaccctcgagagaaagaagtagttctgcatcttctcctgaaatgaaagatggtttacccagaactccatcaaggagaagcaggtctgggtcttctccaggacttagagatgggtctgggactccctcgaggcacagcctgtctgggtcctctcctggaatgaaagatatacctagaacgccatctagagggagaagcgaatgtgattcttccccagaaccgaaagctttgcctcagactcctaggccgaggagtcgttctccatcatccccagagctcaacaacaagtgtcttaccccccagagagaaagaagcgggtcagaatcatcagttgatcagaaaactgtggctcggactcccctggggcagagaagtcgttcgggatcctctcaagaacttgatgtgaaacccagtgcatcccctcaggaaagaagtgagtcagactcttctccagattctaaagccaagacaagaaccccacttcggcagaggagtcggtctggatcatctccagaggttgacagcaaatctcgactatcccctcggcgcagtaggtctggttcctcccctgaagtgaaagataagccaagagcagcacccagggcacagagtggttctgattcctctcctgaacctaaagctccagcccctcgggcccttcccagacgaagcagatcaggttcatcaagcaaaggcagaggcccttctcctgaaggaagcagcagtaccgagtcctctcctgaacatccgcccaaatccagaactgctcgcagaggttccaggtcatcaccagagcccaagaccaagtctcgtacaccacctcgacgtcgcagctctcgatcatctccggagctaacaaggaaggccagactgtcccgtagaagccgctctgcctcatcctcaccagaaactcgctctagaactcccccaaggcaccggagaagtccctcagtgtcttccccggagccagccgaaaaatcgaggtcttcacgccgacggcgctcagcttcatctccacgcactaagacaacctcaaggagaggccgctctccttcgccaaagcctcgtggactccagaggtcccgttcccgctcaaggagagagaaaacaagaacaacccgacgtcgagataggtctggatcttctcagtcaacctctcggcgaagacagcggagccggtcaaggtcgcgggttactcggcggcggaggggaggctctggttatcactcaaggtcacctgcccggcaggaaagttcccggacctcctctcgacgccgaagaggccgctctcggacacccccaaccagtcggaagcgttctcgctcacgcacatcaccagccccgtggaaacgctctagatctcgagcctctccagccactcaccggcgatccaggtccagaacccccctgataagccgacgtaggtccagatctcgaacttcaccagtcagccggagacggtcaaggtccaggacttcagtgactcgacgaagatcccggtcaagagcatccccagtgagcagaaggcgatccagatccagaacgccaccagtaacccgccgtcgttcaaggtctagaacgccaacaacacgccgccgctcccgttctagaactccaccagtgactcgcagaaggtccagatccaggactccaccagtaaccaggaggcgatctcgaagcagaacttcgcctatcactcgcagaagatcaagatccagaacatctccggtcacccgaaggagatctcgatctcgcacatctccagtaactcgaagaaggtcccgctctcgaacctcaccagtgacacgccgccgctctaggtcccggacacctccagctattcggcgccgctctagatctcgaacgccactgttaccacgcaaacgttctcgaagtcgctcaccacttgctatccgccgccgctccagatcccgtactccacgaacagctcggggtaaacggtccttaacaagatctcctccagccatccgcaggcgttctgcatctggaagtagttctgatcgttcacgatctgctactcctccagcaacaagaaatcattctggttcacggacacctccagtagcactcaacagttccagaatgagctgcttcagtcgtcctagcatgtccccaacacctcttgatcgctgcagatcacctggaatgcttgaaccccttggcagctctagaacacccatgtctgtcctgcagcaagccggcggctccatgatggatggtccaggtccccgaatacctgaccaccagagaacatctgtgccagaaaatcatgctcagtccaggattgcacttgccctgacagctatcagtcttggcaccgctcggcctcctccgtccatgtctgctgctggccttgctgcaagaatgtcccaggttccagccccggtgcctctcatgagtctcagaaccgcaccagcagccaaccttgccagcaggattcctgcagcctctgcggcagccatgaacctagccagcgccaggacacctgccattccaacagcagtgaacctggctgactctcgaacgccagctgcagcagcggccatgaacttggccagccccagaacagcggtggcaccttcggctgtgaacctggctgaccctcgcactcccacagccccagctgtgaacctagcaggggccagaaccccagctgccttggcagctctgagtctcacaggctctggcacaccaccaactgctgcaaactatccctccagctccagaacaccacaggctccagcctctgcaaacctggtgggtcctcggtctgcacatgccacagctcctgtgaatattgccggctccagaaccgccgcagccttggcccccgcgagcctcaccagtgctaggatggctccagcattgtctggtgcaaacctcaccagccccagggtgcccctttctgcctacgagcgtgtcagtggcagaacctcaccaccgctccttgaccgagctaggtccagaacaccaccgtctgccccaagccaatctaggatgacctctgaacgggctccctccccttcctctagaatgggccaggctccttcacagtctcttctccctccagcacaggatcagccgaggtctcctgtgccttctgctttttcagaccaatcccgttgtttgattgcccagaccacccctgtagcagggtctcagtccctttcctctggggcagtggcaacgaccacgtcctctgctggtgatcacaatggcatgctctctgtccctgcccctggggtgccccactctgatgtgggggagccacctgcctctactggggcccagcagccttctgcattagccgccctgcagccagcaaaggagcggcggagttcctcctcgtcgtcgtcgtcctctagctcctcctcttcttcatcatcgtcgtcgtcgtcctcctcctcctctggctccagttctagtgactcagagggctctagccttcctgtgcaacctgaggtggcactgaagagggtccccagccccaccccagccccaaaggaggctgttcgagagggacgtcctccggagccaaccccagccaaacggaagaggcgctctagcagttccagttccagctcctcctcttcatcttcctcctcctcctcctcctcctcttcttcctcctcctcttcctcttcttcttcttcctcctcatcttcctcctcctcgtcgtcttcctccccttcccctgctaagcctggccctcaggccttgcccaaacctgcaagccccaagaagccaccccctggcgagcggaggtcccgcagcccccggaagccaatagactccctcagggactctcggtccctcagctactcgcctgtggagcgtcgccgtccctcgccccagccctcaccacgggaccagcagagcagcagcagtgagcggggttcccggagaggccagcgtggggacagccgctcccccagccacaagcgcaggagggagacacctagccctcggcccatgagacaccgctcctccaggtctccataaattgtctttgggggattccaccacacccaatgctctggagccacaaggagtgtcccttcttccccagcagagccgtgggagggtccttgtctgctctcctttgaaccttggcagcccttggatggagggctccctttccctccccttttttttttctttgttcctgtgaaatgttaatctccgtgagttcttcctggttcatgtgttctggggggtttggggtgggagggaatgcagatgggagttgggggaggggaggatacagttcaggataccccagcctggagtcagggccagggaggcatggccccacttgtatccagaagttcccaggggtgattgtgatggtggttgggactggaggttgtataaggtgttcttggaaggaaggggcaggagttggaattagttggtccctactgtcccccatgaggttgtgaacccctccccccaacttttcatgtttcttaaaggcattttggttttttaaaatctgtacagcaagagcaactttttctgtcaaataaaaatgagaaatgcaggaaaaaaaaaaaaaaaaaaaaaaaaaaaa

SEQ ID NO: 2209 - DNA, 822 bp, Homo sapiens
taggcgggagcatccaatcaacttcgagagcgtaggccccacctatcgtgggtcgagttgcttggcggtcgtggttccggaggttcctcgggatgtcggtggccttcgtaccggactggctgaggggcaaggcggaagtcaatcaagagactatccagcggctccttgaggagaatgaccagctgatccgctgtattgtggagtatcagaacaagggccgcgggaacgagtgcgtgcagtaccagcatgtgttacatagaaatctcatttatttggctaccattgcagatgccagtccaaccagcacttcaaaagcaatggaataatctttcaaaagcaatagaataatcttccatttggctgtcgtgaggagtaattgaatgtaatccatctcttacaaaatggagacagggtctttaccaactcaactggttaaaacatgaatgaaacctctgtggctctttcgaaacgtgaaaatgtgaagaaagctactaacttagctgtattctcatgtaaatattttttaaataattaagcaaatccctcaataagttgagcccaggtgtcctctttcctgaacttggagcatgtttggataacaaagacatcactgggatgttcaagtctactttttagtttcaacctgaagaggaaactcagtaggtgttgggcaggaattggtgagattcctgacttgataccttgctaaatggacatgtaactgtgtgctccttcctatcagtttgtaaatgtggtccccctgactgctgttttcagattgctttgaaataaagcttatttttctataaaatactaaaaaaa

SEQ ID NO: 2210 - DNA, 2707 bp, Homo sapiens
ggcaggccgagccagccgtgcgccgcgctccagggcccagggcgccgcacacgcacccacccacccacccagcctcgcagcgccatgggcaagaacaagcagccacgcggccagcagaggcaggggggcccgccggccgcggacgccgctgggcccgacgacatggagccgaagaagggcacgggggcccccaaggagtgcggggaggaggagccccggacctgctgcggctgccggttcccgctgctgctcgccctgctgcagctggccctgggcatcgccgtgaccgtggtgggcttcctcatggcgagcatcagctcctccctgctagtcagggacactccattttgggctgggatcattgtctgcttagtggcctatcttggcttgtttatgctttgtgtctcatatcaggttgacgaacggacatgtattcaattttctatgaaactgttatactttctgctgagtgccctgggcctgacggtctgtgtgctggccgtggcctttgccgcccaccactattcgcagctcacacagtttacctgtgagaccacactcgactcttgccagtgcaaactgccctcctcggagccgctcagcaggacctttgtttaccgggatgtgacggactgtaccagcgtcactggcactttcaaactgttcttactcatccagatgattcttaatttggtctgcggccttgtgtgcttgttggcctgctttgtgatgtggaaacataggtaccaggtcttctatgtgggtgtcaggatatgctccctcacggcttccgaaggcccccagcaaaagatctaacattcttgctcaaagttgcgagagaaagtagcacatggagtagctgaggttaaacaaacaaaaaaaaattttaaacaaagaaaggaaaaaaattgacaataaaagtcactcttctaattgaatatttttatatttttatgaaacaaaagagcatttcttcaggtttctattgtattttttttaacattcttgcagagaaagcaagatccaaattgattttgggatattaaaagttaacagaacactgaacaaggaaagaatggcatagatctatctttacagtctggagttaattcctgttaactcattttatccattccttacataatcttctttcctgttagtccagtttgatggtgtgaatggtgaatttcaggcccagttgctaaattttgtggcatcttcctctagtccttcccacctccagtcatcagccccactctgtcttggagacaggcaggaggtgggggaagagctgaatctctttattttccctggtagagacatcttcaaggcatgaaatagcttaaagagcagagtagaaatggaagaggctttgcaaaaggctagataactaacaacacctgggttggggcggcggcctcttctcttcagctcccttagcttggctccgtaagtggatcacttgccaaatgctttagatgattgcctctcaataattgaaaggtggtggtagttgtattctaaatgatgtagaaggtttaaaaataattacattatgcttctattctatcatctaaaacaaatcattaaaactaatttctagctaattgttaattataattatgctcagaagtctatttaatgagctctgactgtacttacgctgcactgtcggtgttaagagaaattactctcacaagagcagaggcctgaagattctttcttctgaaagccaagcaccacaaggaaaaaaaaattattaatagctcaggttaaaaacacccatttaaacaaaaacaagagcatttgtaataggaagtgtttatacaaacagcacatttgtgatatgttgaaaagcatctctcttggcaaccaatctatgtttgaggaagattgggtaatgctgatgtgttccattcatgaaactgtatttgatacataatcctattattaattcgtatgcttagtcaacctaggaaatcaaaataatgttttgaagttcttatttgagcaatatggccttgacttggagggtagttttagttgttttgtttttaagtgactgtggtttaaagcacaaatgccccaaggtggggagacttctctctgtgattattgttgctattaaattctgaactgtatccatattttaaggaaggagctaaaaatggaaattcatgaaacataaatggtatcaagaactttatcagtatgctttgttgaaagcagaaattaagataataattgagttcaattcgcctctccgcattgcctattgatacactttactaatcatgaaattctaacctaaaaggaaaacattttcctgcttgtcttagaagaaagtggaataattccactgattgtgataatggtttcaatttctacacaatataaatatccagtataaaggaaagcgttaagtcggtaagctagaggattgtaaatatcttttatgtcctctagataaaacacccgattaacagatgttaaaccttttaatgttttgatttgctttaaaaatggccttcctacacattagctccagctaaaaagacacattggagagcttagaggataagtctctggagcagaatttatcacacacaaaagttacaccaacagaataccaagcagaatgatgaggacctgtaaaataccttgtgccctattaaaaaaaaaaaaaaaaaaaaaaaaaaaaaaaaaa

SEQ ID NO: 2211 - DNA, 3067 bp, Homo sapiens
cctttgcccgccttggcggccggctctacgttccctgttctcgcctgcagctccgccatggctcctaaaggcagctccaaacagcagtctgaggaggacctgctcctgcaggatttcagccgcaatctctcggccaagtcctccgcgctcttcttcggaaacgcgttcatcgtgtctgccatccccatctggttatactggcgaatatggcatatggatcttattcagtctgctgttttgtatagtgtgatgaccctagtaagcacatatttggtagcctttgcatacaagaatgtgaaatttgttctcaagcacaaagtagcacagaagagggaggatgctgtttccaaagaagtgactcgaaaactttctgaagctgataatagaaagatgtctcggaaggagaaagatgaaagaatcttgtggaagaagaatgaagttgctgattatgaagctacaacattttccatcttctataacaacactctgttcctggtcgtggtcattgttgcttccttcttcatattgaagaacttcaaccccacagtgaactacatattgtccataagtgcttcatcaggactcatcgccctcctgtctactggctccaaatagaccatgtcagcttcaccccctggctttgtgtctatgggtggcctgtggtatatggaaaagtagcagggtggtcagggtgggagacacaagatgtttttatagtctagagcctttaaaaaacccagcagaatgtaattcagtatttgtttattggctgttttttgacagattgttgaaattaaatgaattgaaagggaaactcagagtactaggacgtttattaaaaggaaaaaaatgtcttgcaatgtgctgtaatcacaagaggagaaaataacttgtttccttgatctgtcagaggtcacagtaacctgggccgagctgttattatttattatataatagtagtaggaagttaataactggttctctgtgttccaagcacaatattacaacttcttttgaaccgtaaatatcagaatgaatcctcttcccaggggattgaacagaagcttaatgtttacaagtgtttgaatttgtgatctgaaataacacaaaattaaaaacatgatttctctaattttccaactagaggaagagaaacttgtggaaaagttctttttttttcttttttttttcttaaagaagggcagccaaggtagtaacctaaaaatagtgcccaggcatatgagagttgtcctacgaggttaaagaacacactgttccactgtatggctttggccctgagtggccagggaggtcaacttgaccctgccatgttggtttgacttactaagacacaggaatcactgttttccttgaccagggtctcacaccctggaggaatgttaagtaagagaaagaacctctttcctgaatattgacatgtaaaagaccaaagtaatttttctgaacttctgcaattctgagaactctccaaggaatttacagtgattttagtgcttgtcagcatttttccatgaggactttcatacatttgactctttagttcacaggttcccattgattgtgagcaagatatttatctctttagcccttggggatccagctgagagcaatctcttgcatttttttacccgtgtatgtacagatatcatttcttgtgtatgccatgacttgaaaaagtttgggaagctctttagcaatatcagctaaaaggatatgaaatcacaggtgatagcagttgtcattcagtaatttcctacaagcagcaccccaaaggaaatatagtcctaatctttactatccacttctaaatttaatgtgaatttcatacatgttattagttgttttctttataattttataaaaattattcatcgggagtttaacttccacttccatgctatcggatgtgttgggctccatgcaagaacttggaagaaaaacaggcaggaatgcatttgcataatgacccagatcatcattttctgcaactgagaattatatttcatcattgcttctagaagtctgcaattctttacttttctttggtgcattattatctaggtgccatcactggataatgtggagtgactagagaagtcacatatcactgtaaggtacagttagggtaacactttagaggtttattatttttaaaaaacttttcttgaactcctggccaacatggtgaaaccccgtctctactaaaaataccaaaattagccaggcgtgatggtgggcgcctgtaatctcagctacttgggaggctgaagcaggagaactgcctgaacccaggaggcagaggttgcggtgagtcgagatcgtgctactactgcctgggtggcaagggtgagactccatctcaaaaaagaaacaaaaaaacccaaaaagttttctttactgttggttaaaaaaaaaagccagaccatagtttgactggtggcatggaatttgtgtatcaaataaatgcatttgcttatttgacaaaccatcagtgtccactatttgttaccagagttgggccactatcttttaaaattgctggtgaaaacttgccactagatggcagtgcctgtatagatggggaaaaaattgccaccattcttggtataatacagtgtagcttagatgaggtggtgaaataggggtatcagccgaatattcctaatatagtttctcttgaattaataaactgaagatttgtaggaaaatgagtgagcaaaatttgtttactgttgtgaatttttcctacagcactgtttttaatcttgatgttttccaactttctgtactaatagatacatttctgtgcataagattataaagcatatactcacagttcagtagttttcgttaaggatttactgtgtgagtactttactgtgaggaattgcagaaccttttcccctctactcttgtctaaaagttctgtgtggcacacagagatgcgacctactcaatctgacttagtaaaaccatgctgtagaatttttgtcttaaaaagaccacatacccagcacccatgaaataaaagattcatctgtaaaaa

SEQ ID NO: 2212 - DNA, 2911 bp, Homo sapiens
ctccagcctccgccggcggagcccactatgccagacagtttcgacactttgcaaagacaaagagccctagaccggagggaggaggaggaggaagaagagcggagagagaaggaagaggcgatgtgagctgggaagggggcaagtgtccgggacacccacacccctgtattctcctccgaaccccttcatgcccaaatcccggaaactccagcgtgtctccagccgtgttggtaccattttcagatttcatcttcctaaactggaaatgtcaatgagaggaaattaacacccccaagagctgcagtgagcaaatgcattgagcttgggtcaggacaattccatttggggaccagagatggacggtcactcagcctatggagatgaagaaactgaggttcagagaggttaagagactccactgaggtcacacagccgatgacagacaaccttctgtgccttcatcaagctggttgtgtacccaccatgtccctggcgacaggatgggaaagaaaaagccctaattaaggatcgtcagaaaccacagttggaggaggacggcagagacagtttccctccccgctataccaacacccttccttcgaggtcctcgctcctgagggaccctggactgtcacagagattaatgaccccttatcttctttggatgtgaaaggaaatcactggttaaagcttgatcgagagacattatcagctctttaaggattgcagaagaataggctactttattttctgaaaaggtaaatatatgcaagcaaagccaacatgccacgaatggcgttggtctaccacacagccgtgtctgggacacagttgggggtcatcccccagcaggagtgaagtcgagcttagcggcccttgtgtcctcccttggaattcctgccatcccttttgattgagcctccacctctgggatttttcttccatttttctcctctcttaggagggagttcctgctacccatcgtgggaggccaccatcaggactgcgaagatggtgaccctgcggaagaggaccctgaaagtgctcaccttcctcgtgctcttcatcttcctcacctccttcttcctgaactactcccacaccatggtggccaccacctggttccccaagcagatggtcctggagctctccgagaacctgaagagactgatcaagcacaggccttgcacctgcacccactgcatcgggcagcgcaagctctcggcctggttcgatgagaggttcaaccagaccatgcagccgctgctgaccgcccagaacgcgctcttggaggacgacacctaccgatggtggctgaggctccagcgggagaagaagcccaataacttgaatgacaccatcaaggagctgttcagagtggtgcctgggaatgtggaccctatgctggagaagaggtcggtgggctgccggcgctgcgccgttgtgggcaactcgggcaacctgagggagtcttcttatgggcctgagatagacagtcacgactttgtcctcaggatgaacaaggcgcccacggcagggtttgaagctgatgttgggaccaagaccacccaccatctggtgtaccctgagagcttccgggagctgggagataatgtcagcatgatcctggtgcccttcaagaccatcgacttggagtgggtggtgagcgccatcaccacgggcaccatttcccacacctacatcccggttcctgcaaagatcagagtgaaacaggataagatcctgatctaccacccagccttcatcaagtatgtctttgacaactggctgcaagggcacgggcgatacccatctaccggcatcctctcggtcatcttctcaatgcatgtctgcgatgaggtggacttgtacggcttcggggcagacagcaaagggaactggcaccactactgggagaacaacccatccgcgggggcttttcgcaagacgggggtgcacgatgcagactttgagtctaacgtgacggccaccttggcctccatcaataaaatccggatcttcaaggggagatgacgcagtgaagggctgaggatggacgcactgtcacacctctgcatttccagccccagcatcttgctggagccgttccatcccggagcttggaggggcagcctcaggtgtgtgcctgggcaccgctcacagcctcttgcacccagccgttggcagcatctactcagcaaggtcactaagctctgccagcgtggcagagcatgtcttggaacctgtcttgagtggggacaacgtccccccactgctgccctagagctggggagacgctgggaaaggttcaacctccacacactaaaatcattttggctcctggggcaagcttggggaatgaatgtggaagatgcctatattctgagagacaggacagtttcccaggaagatgggcagagacttgagtggcgattacctccagcacagagacgtgccaggcggtgttggcgctcggggcgagatgctgcccttctttgcacgaagcctggcctcttgcttggcgtgataaccctgtcatcttcccaaagctcatttatgagccaccagaggctcctaccccaaagattttcacagaaacttgaggccaggtgccgtggctcacacctgtaatctgaacactttgggaggccgaggcgggaggatcacttgagcccaggagttcaagaccagcctgggcaacatagtgagactcctgtctctacaaaaataaaagatttaaaaaaattagccaggcacggtggcacacacttgtagccccagctactagggaggctgaggagggaggatctcttgtgcctaggagttcgaggctgcagtgggctgtgatcacaccactgcactccagcctgggcaacagagtgagaccctgtctctgaaaaaaaaaaaaaaa

SEQ ID NO: 2213 - DNA, 7870 bp, Homo sapiens
actctgtcctggacagcgtgcccaccagccatggcggggccccggggcctcctcccactctgcctcctggccttctgcctggcaggcttcagcttcgtcagggggcaggtgctgttcaaaggctgtgatgtgaaaaccacgtttgtcactcatgtaccctgcacctcgtgcgcggccatcaagaagcagacgtgtccctcaggctggctgcgggagctcccggatcagataacccaggactgccgctacgaagtacagctggggggctctatggtgtccatgagcggctgcagacggaagtgccggaagcaagtggtgcagaaggcctgctgccctggctactggggttcccggtgccatgaatgccctgggggcgctgagaccccatgcaatggccacgggacctgcttggatggcatggacaggaatgggacctgtgtgtgccaggaaaacttccgcggctcagcctgccaggagtgccaagaccccaaccggttcgggcctgactgccaatcggtgtgcagctgtgtgcacggagtgtgcaaccatgggccacgtggggatggaagctgcctgtgctttgctggatacactggcccccactgtgatcaagagctgcccgtctgccaggagctgcgctgtccccagaacacccagtgctccgcagaggctcccagctgcaggtgcctgcccggctacacacagcagggcagtgaatgccgagcccccaacccctgctggccatcaccctgctcactgctggcccagtgctcggtgagccccaaggggcaggctcagtgtcactgccctgagaactaccatggcgatgggatggtgtgtctgcccaaggacccatgcactgacaaccttggtggctgccccagcaactctactttgtgtgtgtaccagaagccgggccaggccttctgcacctgccggccaggcctggtcagcatcaacagcaacgcttctgcgggctgcttcgccttctgctcccccttctcctgcgaccggtctgccacttgccaggtgaccgctgatgggaagaccagctgtgtgtgcagggaaagcgaggtgggggatgggcgtgcctgctacggacacctgctccacgaggtgcagaaggccacacagacaggccgggtgttcctgcagctgagggtcgccgtggccatgatggaccagggctgccgggaaatccttaccacagcgggccctttcaccgtgctggtgccatccgtctcctccttctcctccaggaccatgaatgcatcccttgcccagcagctctgtagacagcacatcatcgcagggcagcacatcctggaggacacaaggacccaacaaacacgaaggtggtggacgctggccgggcaggagatcaccgtcacctttaaccaattcacgaaatactcctacaagtacaaagaccagccccagcagacgttcaacatctacaaggccaacaacatagcagctaatggcgtcttccacgtggtcactggcctgcggtggcaggccccctctgggacccctggggatcccaagagaactatcggacagatcctcgcctctaccgaggccttcagccgctttgaaaccatcctggagaactgtgggctgccctccatcctggacggacctgggcccttcacagtctttgccccaagcaatgaggctgtggacagcttgcgtgacggccgcctgatctacctcttcacagcgggtctctctaaactgcaggagttggtgcggtaccacatctacaaccacggccagctgaccgttgagaagctcatctccaagggtcggatcctcaccatggcgaaccaggtcctggctgtgaacatttctgaggaggggcgcatcctgctgggacccgagggggtcccgctgcagagggtagacgtgatggccgccaatggtgtgatccacatgctggacggcatcctgctgcccccgaccatcctgcccatcctgcccaagcactgcagcgaggagcagcacaagattgtggcgggctcctgtgtggactgccaagccctgaacaccagcacgtgtccccccaacagtgtgaagctggacatcttccccaaggagtgtgtctacatccatgacccaacggggctcaatgtgctaaagaagggctgtgccagctactgcaaccaaaccatcatggaacaaggctgctgcaaaggttttttcgggcctgactgcacgcagtgtcctgggggcttctccaacccctgctatggcaaaggcaattgcagtgatgggatccagggcaatggggcctgcctctgcttcccagactacaagggcatcgcctgccacatctgctcgaacccaaacaagcatggagagcaatgccaggaagactgcggctgtgtccatggtctctgcgacaaccgcccaggcagtgggggggtgtgccagcagggcacgtgtgcccctggcttcagtggccggttctgcaacgagtccatgggggactgtgggcccacagggctggcccagcactgccacctgcatgcccgctgtgttagccaggagggtgttgccagatgtcgctgtcttgatggctttgagggtgatggcttctcctgcacacctagcaacccctgctcccacccggaccgtggaggctgctcagagaatgctgagtgtgtccctgggtccctgggcacccaccactgcacatgccacaaaggctggagtggggatggccgcgtctgtgtggctattgacgagtgtgagctggacgtgggaggtggctgccacaccgatgccctctgcagctatgtgggccccgggcagagccgatgcacctgcaagctgggctttgccggggatggctaccagtgcagccccatcgacccctgccgggcaggcaatggcggctgccacggcctggccacctgccgggcagtggggggaggtcagcgggtctgcacgtgcccccctggctttgggggtgatggcttcagctgttatggagacatcttccgggagctggaggcaaatgcccacttctccatcttctaccaatggcttaagagtgccggcatcacgcttcctgccgaccgccgagtcacagccctggtgccctccgaggctgcagtccgtcagctgagccccgaggaccgagctttctggctgcagccaaggacgctgccgaacctggtcagggcccattttctccagggtgccctcttcgaggaggagctggcccggctgggtgggcaggaagtggccaccctgaaccccaccacacgctgggagattcgcaacattagtgggagggtctgggtgcagaatgccagcgtggatgtggctgacctccttgccaccaacggtgtcctacacatcctcagccaggtcttactgcccccccgaggggatgtgcccggtgggcaggggttgctgcagcagctggacttggtgcctgccttcagcctcttccgggaattgctgcagcaccatgggttggtgccccagattgaggctgccactgcctacaccatctttgtgcccaccaaccgctccctggaggcccagggcaacagcagtcacctggacgcagacacagtgcggcaccatgtggtcctgggggaggccctctccatggaaaccctgcggaagggtggacaccgcaactccctcctgggccctgcccactggatcgtcttctacaaccacagtggccagcctgaggtgaaccatgtgccactggaaggccccatgctggaggcccctggccgctcgctgattggtctgtcgggggtcctgacggtgggctcaagtcgctgcctgcatagccacgctgaggccctgcgggagaaatgtgtaaactgcaccaggagattccgctgcactcagggcttccagctgcaggacacacccaggaagagctgtgtctaccgatctggcttctccttctcccggggctgctcttacacatgtgccaagaagatccaggtgccggactgctgccctggtttctttggcacgctgtgtgagccatgcccagggggtctagggggggtgtgctcaggccatgggcagtgccaggacaggttcctgggcagcggggagtgccactgccacgagggcttccatggaacggcctgtgaggtgtgtgagctgggccgctacgggcccaactgcaccggagtgtgtgactgtgcccatgggctgtgccaggaggggctgcaaggggacggaagctgtgtctgtaacgtgggctggcagggcctccgctgtgaccagaaaatcaccagccctcagtgccctaggaagtgcgaccccaatgccaactgcgtgcaggactcggccggagcctccacctgcgcctgtgctgcgggatactccggcaatggcatcttctgttcagaggtggacccctgcgcccacggccatgggggctgctcccctcatgccaactgtaccaaggtggcacctgggcagcggacatgcacctgccaggatggctacatgggcgacggggagctgtgccaggaaattaacagctgtctcatccaccacgggggctgccacattcacgccgagtgcatccccactggcccccagcaggtctcctgcagctgccgtgagggttacagcggggatggcatccggacctgcgagctcctggacccctgctctaagaacaatggaggatgcagcccatatgccacctgcaaaagcacaggggatggccagaggacatgtacctgcgacacagcccacaccgtgggggacggcctcacctgccgtgcccgagtcggcctggagctcctgagggataagcatgcctcattcttcagcctccgcctcctggaatataaggagctcaagggcgatgggcctttcaccatcttcgtgccgcacgcagatctaatgagcaacctgtcgcaggatgagctggcccggattcgtgcgcatcgccagctggtgtttcgctaccacgtggttggctgtcggcggctgcggagcgaggacctgctggagcaggggtacgccacggccctctcagggcacccactgcgcttcagcgagagggagggcagcatatacctcaatgacttcgcgcgcgtggtgagcagcgaccatgaggccgtgaacggcatcctgcacttcattgaccgtgtcctgctgccccccgaggcgctgcactgggagcctgatgatgctcccatcccgaggagaaatgtcaccgccgccgcccagggcttcggttacaagatcttcagcggcctcctgaaggtggccggcctcctgcccctgcttcgagaggcatcccataggcccttcacaatgctgtggcccacagacgccgcctttcgagctctgcctccggatcgccaggcctggctgtaccatgaggaccaccgtgacaagctagcagccattctgcggggccacatgattcgcaatgtcgaggccttggcatctgacctgcccaacctgggcccacttcgaaccatgcatgggacccccatctctttctcctgcagccgaacgcggcccggtgagctcatggtgggtgaggatgatgctcgcattgtgcagcggcacttgccctttgagggtggcctggcctatggcatcgaccagctgctggagccacctggccttggtgctcgctgtgaccactttgagacccggcccctgcgactgaacacctgcagcatctgtgggctggagccaccctgtcctgaggggtcacaggagcagggcagccctgaggcctgctggcgcttctacccgaagttctggacgtcccctccgctgcactctttgggattacgcagcgtctgggtccaccccagcctttggggtaggccccaaggcctgggcaggggctgccaccgcaattgtgtcaccaccacctggaagcccagctgctgccctggtcactatggcagtgagtgccaagcttgccctggcggccccagcagcccttgtagtgaccgtggcgtgtgcatggacggcatgagtggcagtgggcagtgtctgtgccgttcaggttttgctgggacagcctgtgaactctgtgctcctggtgcctttgggccccattgtcaagcctgccgctgcactgtgcatggccgctgtgatgagggccttgggggctctggctcctgcttctgtgatgaaggctggactgggccacgctgtgaggtgcaactggagctgcagcctgtgtgtaccccaccctgtgcacccgaggctgtgtgccgtgcaggcaacagctgtgagtgcagcctgggctatgaaggggatggccgcgtgtgtacagtggcagacctgtgccaggacgggcatggtggctgcagtgagcacgccaactgtagccaggtaggaacaatggtcacttgtacctgcctgcccgactacgagggtgatggctggagctgccgggcccgcaacccctgcacagatggccaccgcgggggctgcagcgagcacgccaactgcttgagcaccggcctgaacacacggcgctgtgagtgccacgcaggctacgtaggcgatggactgcagtgtctggaggagtcggaaccacctgtggaccgctgcttgggccagccaccgccctgccactcagatgccatgtgcactgaccagcacttccaggagaaacgggctggcgttttccacctccaggccaccagcggcccttatggtctgaacttttcggaggctgaggcggcatgcgaagcacagggagccgtccttgcttcattccctcagctctctgctgcccagcagctgggcttccacctgtgcctcatgggctggctggccaatggctccactgcccaccctgtggttttccctgtggcggactgtggcaatggtcgggtgggcgtagtcagcctgggtgcccgcaagaacctctcagaacgctgggatgcctactgcttccgtgtgcaagatgtggcctgccgatgccgaaatggctttgtgggtgacgggatcagcacgtgcaatgggaagctgctggatgtgctggctgccactgccaacttctccaccttctatgggatgctattgggctatgccaatgccacccagcggggtctcgacttcctggacttcctggatgatgagctcacgtataagacactcttcgtccctgtcaatgaaggctttgtggacaacatgacgctgagtggcccagacttggagctgcatgcctccaacgccaccctcctaagtgccaacgccagccaggggaagttgcttccggcccactcaggcctcagcctcatcatcagtgacgcaggccctgacaacagttcctgggcccctgtggccccagggacagttgtggttagccgtatcattgtgtgggacatcatggccttcaatggcatcatccatgctctggccagccccctcctggcacccccacagccccaggcagtgctggcgcctgaagccccacctgtggcggcaggcgtgggggctgtgcttgccgctggagcactgcttggcttggtggccggagctctctacctccgtgcccgaggcaagcccacgggctttggcttctctgccttccaggcggaagatgatgctgacgacgacttctcaccgtggcaagaagggaccaaccccaccctggtctctgtccccaaccctgtctttggcagcgacaccttttgtgaacccttcgatgactcactgctggaggaggacttccctgacacccagaggatcctcacagtcaagtgacgaggctggggctgaaagcagaagcatgcacagggaggagaccacttttattgcttgtctgggtggatggggcaggaggggctgagggcctgtcccagacaataaagtgccctcagcggatgtgggc

SEQ ID NO: 2214 - DNA, 5166 bp, Homo sapiens
ccggacccaagtctgcagcggcgccattggcgtgtggaaaatgccaccagatggcgggttaggattgcagctccgttgaaggcgcggcccccgctcccgaacccccggcgaccaccccgtaacaacccccccacatcgggaataacacaccggagacttttggggggaaactaggtcgatggtcggcggcgcccggatgggcagctgaggattgcctttgaggttattttaaaagttttgagttgtacagcacttgattattttgctgcattgtgaaaggacctctccagcaatgattacttcagaattaccagtgttacaggattcaactaatgaaactactgcccattccgatgctggcagcgagcttgaagaaacagaggtcaaaggaaaaagaaaaaggggtcgtcctggccggcctccatctacaaataagaaacctcgaaaatctccaggtgagaagagcagaattgaagctggaattagaggagcaggccgtggaagagctaatggacaccctcaacagaatggggaaggggagcctgtcacattatttgaggtggtgaaactggggaaaagtgcaatgcagtccgtggtggatgactggattgaatcatataaacaagacagggacatcgcacttctggatttaatcaacttttttatccagtgttcaggatgtcgaggtactgtgagaatagagatgtttcgaaatatgcagaatgcagaaatcatcagaaaaatgactgaagaatttgatgaggacagtggtgattatcctcttaccatgcctggacctcagtggaaaaaatttcgttcaaacttttgtgaatttattggagtcctgattcgacagtgtcagtatagcataatttatgatgagtatatgatggacacagtaatctcccttttgacgggtttgtcagactcccaggtcagagcttttaggcatacaagtaccctggctgccatgaagctcatgactgctctggtgaatgttgccttaaacctcagtattcatcaggataatacccagagacaatatgaagccgagagaaataaaatgattgggaagagagccaatgaaaggttggagttactacttcagaaacgcaaagagctgcaagaaaatcaggatgaaatcgaaaatatgatgaactctatttttaagggtatatttgttcatagataccgtgatgctattgctgagattagagccatttgtattgaagaaattggagtatggatgaaaatgtatagtgatgccttcctaaatgacagttacctaaaatatgttggctggactcttcatgacaggcaaggggaagtcaggctgaagtgtttgaaagctctgcagagtctatataccaatagagaattattccccaaattggaactattcactaaccgattcaaggatcgcattgtatcaatgacacttgataaagaatatgatgttgctgtggaagctattcgattggttactctgatacttcatggaagtgaagaagctctttccaatgaagactgtgaaaatgtttaccacttggtgtactcggcacatcgccctgttgctgtggcagctggagagttccttcacaaaaagctatttagcagacatgacccacaagcagaagaagcattagcaaagaggaggggaagaaacagcccgaatggaaacctcattaggatgctggttcttttctttcttgaaagtgagttacatgaacatgcagcctacttggtggacagtttatgggagagctctcaagaactgttgaaagactgggaatgtatgacagagttgctattagaagaacctgttcaaggagaggaagcaatgtctgatcgtcaagagagtgctcttatagagctaatggtttgtacaattcgtcaagctgctgaggcacatcctccagtgggaaggggtaccggcaagagagtgctaactgccaaagaaaggaaaactcaaattgatgatagaaacaaattgactgaacattttattattacacttcctatgttactgtcaaagtattctgcagatgcagagaaggtagcaaacttgctacaaatcccacagtattttgatttagaaatctacagcacaggtagaatggaaaagcatctggatgctttattaaaacagattaagtttgttgtggagaaacacgtagaatcagatgttctagaagcctgcagtaaaacctatagtatcttatgcagtgaagaatataccatccagaacagagttgacatagctcgaagccagctgattgatgagtttgtagatcgattcaatcattctgtggaagacctattgcaagagggagaagaagctgatgatgatgacatttacaatgttctttctacattaaagcggttaacttcttttcacaatgcacatgatctcacaaaatgggatctctttggtaattgctacagattattgaagactggaattgaacatggagccatgccagaacagatagtcgtgcaagcactgcagtgttcccattattcgattctttggcagttggtgaaaattactgatggctctccttccaaagaggatttgttggtattgaggaaaacggtgaaatcctttttggctgtttgccagcagtgcctgtctaatgttaatactccagtgaaagaacaggctttcatgttactctgtgatcttctgatgattttcagccaccaattaatgacaggtggcagagagggccttcagcctttggtgttcaatccagatactggactccaatctgaactcctcagttttgtgatggatcacgtttttattgaccaagacgaggagaaccagagcatggagggtgatgaagaagatgaagctaataaaattgaggccttacataaaagaaggaatctacttgctgctttcagcaaacttatcatttatgacattgttgacatgcatgcagctgcagacatcttcaaacactacatgaagtattacaatgactatggtgatattattaaggaaacactgagtaaaaccaggcagattgataaaattcagtgtgccaagactctcattctcagtttgcaacagttatttaatgaacttgttcaagagcaaggtcccaacctagataggacatctgcccatgtcagtggcattaaagaactggcacgtcgctttgcccttacatttggattggaccagattaagacacgagaagcagttgccacacttcacaaggatggcatagagtttgcatttaaataccaaaatcagaaaggacaagagtatccacctcctaatctggcttttcttgaagtactaagtgaattttcttctaaacttcttcgacaggacaaaaagacagttcattcatacctagagaaattccttaccgagcagatgatggaaaggagggaggatgtatggcttccactcatctcctatagaaattcattagtcactgggggtgaagatgatagaatgtctgtgaacagtggaagtagcagcagcaaaacctcatcagtaaggaataagaaaggacgacctccacttcataaaaaacgagtagaagatgagagtctggataacacatggctaaacaggactgacaccatgattcagactcctggccccctgccagcaccacaactcacatccactgtactgcgggagaacagtcggcccatgggagaccagattcaagaacctgagtctgaacatggttctgaaccagactttttacacaatcctcagatgcagatctcttggttaggccagccgaagttagaagacttaaatcggaaggacagaacaggaatgaactacatgaaagtgagaactggagtgaggcatgctgttcggggtctaatggaggaagatgctgagcccatctttgaagatgtgatgatgtcatcccgaagccagttagaagatatgaatgaagaatttgaggacaccatggttattgatctgcctccatcaagaaatcggcgagagagagctgagctaaggccagacttctttgactctgcagctatcatagaagatgattcaggatttggaatgcctatgttctgaagtctgaagaaaatttacaaatctggaactctattatttagagctagaggcctatatactgtgatagcttgtatggggaaaaacacttttgatgtgatctgatttgttttttaatcaaatgattaaggtcaatccctttttgcagtgacagaagaggagcatgtaaattacccaagggaatgttggtgaatgtcaactcagaaagactgacctgaaaatcatttgtgtcctactattggacttatcccaatacagatgtgtgtgtttttctggagggaggaagaaattttaaatttttaaaacagctgtcaagataaacactgttatacacctgttttatgaaaactcaacattgagtaaaaaaaaacatatttttaactttattttcctgttgtacaatttaaaaaccgttttaacattttgcctttttatgttttaaaagctaaccatttttattaaacctatgagtaagcagctcatcctaattgcgaagagtgttttggagttcactggatttggttgacctttgtggaacacaaataatgaaggagcagaacattgacaagctaagatgaaattctgacatagtacatctctgccaaaaaccacacaccctctgtggatatggatatgaattcccagattttatatactcttgaataaaaggtttatttttatttataagtgggcataaaataagaaatgtccatgcagccatttttccaacagatgctgtacaccgttcattttatatagactagggagattcaaatacagtgcattttctattggtatttgttctgtgcatttttagcaacttctaccagcaaataaagtattctcagtaaaacgaaaatgattctcaagttatcagtttgctgtttttaccacttatttcatgccctgccaaattcaagttacacagacttccattttcttaagataatcaatcatgaagaaatcctttatcaatcattcaaaagtaattttaagtgtaacataactgtgtttacttcccatgcacttaatacccttatgcgctaattttgtgaattaagtttactgattatagaagtatgtgctgcatagaagtctgt

SEQ ID NO: 2215 - DNA, 2073 bp, Homo sapiens
ggcgctactgaggccgcggagccggactgcggttggggcgggaagagccggggccgtggctgacatggagcagccctgctgctgaggccgcgccctccccgccctgaggtgggggcccaccaggatgagcaagctgcccagggagctgacccgagacttggagcgcagcctgcctgccgtggcctccctgggctcctcactgtcccacagccagagcctctcctcgcacctccttccgccgcctgagaagcgaagggccatctctgatgtccgccgcaccttctgtctcttcgtcaccttcgacctgctcttcatctccctgctctggatcatcgaactgaataccaacacaggcatccgtaagaacttggagcaggagatcatccagtacaactttaaaacttccttcttcgacatctttgtcctggccttcttccgcttctctggactgctcctaggctatgccgtgctgcggctccggcactggtgggtgattgcggtcacgacgctggtgtccagtgcattcctcattgtcaaggtcatcctctctgagctgctcagcaaaggggcatttggctacctgctccccatcgtctcttttgtcctcgcctggttggagacctggttccttgacttcaaagtcctaccccaggaagctgaagaggagcgatggtatcttgccgcccaggttgctgttgcccgtggacccctgctgttctccggtgctctgtccgagggacagttctattcacccccagaatcctttgcagcgtctgacaatgaatcagatgaagaagttgctgggaagaaaagtttctctgctcaggagcgggagtacatccgccaggggaaggaggccacggcagtggtggaccagatcttggcccaggaagagaactggaagtttgagaagaataatgaatatggggacaccgtgtacaccattgaagttccctttcacggcaagacgtttatcctgaagaccttcctgccctgtcctgcggagctcgtgtaccaggaggtgatcctgcagcccgagaggatggtgctgtggaacaagacagtgactgcctgccagatcctgcagcgagtggaagacaacaccctcatctcctatgacgtgtctgcaggggctgcgggcggcgtggtctccccaagggacttcgtgaatgtccggcgcattgagcggcgcagggaccgatacttgtcatcagggatcgccacctcacacagtgccaagcccccgacgcacaaatatgtccggggagagaatggccctgggggcttcatcgtgctcaagtcggccagtaacccccgtgtttgcacctttgtctggattcttaatacagatctcaagggccgcctgccccggtacctcatccaccagagcctcgcggccaccatgtttgaatttgcctttcacctgcgacagcgcatcagcgagctgggggcccgggcgtgactgtgccccctcccaccctgcgggccagggtcctgtcgccaccacttccagagccagaaagggtgccagttgggctcgcactgcccacatgggacctggccccaggctgtcaccctccaccgagccacgcagtgcctggagttgactgactgagcaggctgtggggtggagcactggactccggggccccactggctggaggaagtggggtctggcctgttgatgtttacatggcgccctgcctcctggaggaccagattgctctgccccaccttgccagggcagggtctgggctgggcacctgacttggctggggaggaccagggccctgggcagggcagggcagcctgtcacccgtgtgaagatgaaggggctcttcatctgcctgcgctctcgtcggtttttttaggattattgaaagagtctgggacccttgttggggagtgggtggcaggtgggggtgggctgctggccatgaatctctgcctctcccaggctgtccccctcctcccagggcctcctgggggacctttgtattaagccaattaaaaacatgaatttaaaaaaaaaaaaaaaaaaaaaaaaaaaaaaaaaaaaaaaaaaaaaaaaaa

SEQ ID NO: 2216 - DNA, 5171 bp, Homo sapiens
ggcgggaggagagtcggcggccggagccgtcaccccgggcggggacccagcgcaggcaactccgcgcggcggcccggccgagggagggagcgagcgggcgggcgggcaagccagacagctgggccggagcagccgcgggcgcccgaggggccgagcgagattgtaaaccatggctgtgtggatacaagctcagcagctccaaggagaagcccttcatcagatgcaagcgttatatggccagcattttcccattgaggtgcggcattatttatcccagtggattgaaagccaagcatgggactcagtagatcttgataatccacaggagaacattaaggccacccagctcctggagggcctggtgcaggagctgcagaagaaggcagagcaccaggtgggggaagatgggtttttactgaagatcaagctggggcactatgccacacagctccagaacacgtatgaccgctgccccatggagctggtccgctgcatccgccatatattgtacaatgaacagaggttggtccgagaagccaacaatggtagctctccagctggaagccttgctgatgccatgtcccagaaacacctccagatcaaccagacgtttgaggagctgcgactggtcacgcaggacacagagaatgagttaaaaaagctgcagcagactcaggagtacttcatcatccagtaccaggagagcctgaggatccaagctcagtttggcccgctggcccagctgagcccccaggagcgtctgagccgggagacggccctccagcagaagcaggtgtctctggaggcctggttgcagcgtgaggcacagacactgcagcagtaccgcgtggagctggccgagaagcaccagaagaccctgcagctgctgcggaagcagcagaccatcatcctggatgacgagctgatccagtggaagcggcggcagcagctggccgggaacggcgggccccccgagggcagcctggacgtgctacagtcctggtgtgagaagttggccgagatcatctggcagaaccggcagcagatccgcagggctgagcacctctgccagcagctgcccatccccggcccagtggaggagatgctggccgaggtcaacgccaccatcacggacattatctcagccctggtgaccagcacgttcatcattgagaagcagcctcctcaggtcctgaagacccagaccaagtttgcagccactgtgcgcctgctggtgggcgggaagctgaacgtgcacatgaaccccccccaggtgaaggccaccatcatcagtgagcagcaggccaagtctctgctcaagaacgagaacacccgcaatgattacagtggcgagatcttgaacaactgctgcgtcatggagtaccaccaagccacaggcacccttagtgcccacttcaggaatatgtccctgaaacgaattaagaggtcagaccgtcgtggggcagagtcggtgacagaagaaaaatttacaatcctgtttgaatcccagttcagtgttggtggaaatgagctggtttttcaagtcaagaccctgtccctgccagtggtggtgatcgttcatggcagccaggacaacaatgcgacggccactgttctctgggacaatgcttttgcagagcctggcagggtgccatttgccgtgcctgacaaagtgctgtggccacagctgtgtgaggcgctcaacatgaaattcaaggccgaagtgcagagcaaccggggcctgaccaaggagaacctcgtgttcctggcgcagaaactgttcaacaacagcagcagccacctggaggactacagtggcctgtctgtgtcctggtcccagttcaacagggagaatttaccaggacggaattacactttctggcaatggtttgacggtgtgatggaagtgttaaaaaaacatctcaagcctcattggaatgatggggccattttggggtttgtaaacaagcaacaggcccatgacctactcattaacaagccagatgggaccttcctcctgagattcagtgactcagaaattggcggcatcaccattgcttggaagtttgattctcaggaaagaatgttttggaatctgatgccttttaccaccagagacttctccattcggtccctagccgaccgcttgggagacttgaattaccttatctacgtgtttcctgatcggccaaaagatgaagtatactccaaatactacacaccagttccctgcgagtctgctactgctaaagctgttgatggatacgtgaagccacagatcaagcaagtggtccctgagtttgtgaacgcatctgcagatgccgggggcggcagcgccacgtacatggaccaggccccctccccagctgtgtgtccccaggctcactataacatgtacccacagaaccctgactcagtccttgacaccgatggggacttcgatctggaggacacaatggacgtagcgcggcgtgtggaggagctcctgggccggccaatggacagtcagtggatcccgcacgcacaatcgtgaccccgcgacctctccatcttcagcttcttcatcttcaccagaggaatcactcttgtggatgttttaattccatgaatcgcttctcttttgaaacaatactcataatgtgaagtgttaatactagttgtgaccttagtgtttctgtgcatggtggcaccagcgaagggagtgcgagtatgtgtttgtgtgtgtgtgtgtgtgtgtgtgtgtgtgcgtgtttgcacgttatggtgtttctccctctcactgtctgagagtttagttgtagcagaggggccacagacagaagctgtggtggtttttactttgtgcaaaaaggcagtgagtttcgtgaagcctggaagttggccatgtgtcttaagagtggctggactttgacatgtggctgtttgaataagagaaggacaaagggaggagaaagcacatgtgctccagtgagtcttcgtcactctgtctgccaagcaattgatatataaccgtgattgtctctgcttttcttctgaaatgtagataactgctttttgacaaagagagccttccctctcccccacccctgtgttcttgggtaggaatgggaaaaggggcaacctacaaagattgttggggcaagggaagtcacaagctttcggatgggcggtggcttttcacaaaacatttagctcatcttattctctctttgtcctctctcccctcctgcccgcccgcaccctggaattgccactcagttcctctgggtgtgcacatatgtttggagaaatagaggagagaaaagagggccacgtaactgagagcttacagtgccaatgccgtttgtgttctggccagagtggagtgcgcagccctgactcccaggcgctgagattgttgcctggttacccaggaagctgctgttccggctgcccagcctttctctgagccagcggatgcacagtccgtggccttcttcaggcttattgatgatgctttttgcaaatgttgaatcatggttctgtttctaagttggatcttttttgttttctccttgccaccctaatttgacatcaaaattctctcttgtgcattgggccctgggtcattcaaacccaggtcacctcattccccttctctgttcacacctaatgtcttgaagagtaggtagcagcagtgtgggctgaacctaggccagcttgcttagcgggtcaccctgctgtgaagtcctggcaggtgttggtaatgtgtggaaatgcagtcagcaagtttgctggggagtttgataaaagtataaaacaaaacaaaaaaagcctcggtataattttgttccacgacttcttctgtagctttacaccagaaggaaggaatgggctacagcaggtagtggaggaagaggggggtgagcaggtgtattaaaatagcttacgggtaaggcctaaaaggtcacccctcggccccctctccaaaagaagggcatgggcacccccaggagaggatggccccaaaaaccttatttttatacatgagagtaaataaacatattttttttacaaaaataacttctgaatttatcagtgttttgccgttaaaaatattcctctatagtaaattatttattggaagatgacttttttaaagctgccgtttgccttggcttggtttcatacactgatttatttttctatgccaggcagtagagtctctctgcctctgaggagcaggctacccgcatcccactcagcccctccctacccctcaagatttgatgaaaattccaaccatgaggatgggtgcatcggggaagggtgagaaggagagcctgcctgctcagggatccaggctcgtagagtcactccctgcccgtctcccagagatgcttcaccagcacctgcctctgagacctcgctctctgttccagcaaccctggttggggggtcagacttgatacactttcaggttgggagtggacccaccccagggcctgctgaggacagagcagccaggccgtcctggctcactttgcagttggcactgggttggggaggaagagagctgatgagtgtggcttccctgagctggggtttccctgcttgtccagttgtgagctgtcctcggtgttaccgaggctgtgcctagagagtggagatttttgatgaaaggtgtgctcgctctctgcgttctatcttctctctcctccttgttcctgcaaaccacaagataaaggtagtggtgtgtctcgaccccatcagcctctcacccactcccagacacacacaagtcctcaaaagtttcagctccgtgtgtgagatgtgcaggttttttctagggggtagggggagactaaaatcgaatataacttaaaatgaaagtatactttttataatttttctttttaaaacttggtgaaattatttcagatacatattttagtgtcaaggcagattagttatttagccaccaaaaaaaagtattgtgtacaatttggggcctcaaatttgactctgcctcaaaaaaaagaaatatatcctatgcagagttacagtcacaaagttgtgtattttatgttacaataaagccttcctctgaagggaaaaaaaaaaaaaaaaaaaaaaaaaaaaaaaaaaaaaaaaaaaaaaaaaaaaaaaaaaaaaaaaaaaaaaaaaaaaaa

SEQ ID NO: 2217 - DNA, 1145 bp, Homo sapiens
atgcagggccgcgtggcagggagctgcgctcctctgggcctgctcctggtctgtcttcatctcccaggcctctttgcccggagcatcggtgttgtggaggagaaagtttcccaaaacttggggaccaacttgcctcagctcggacaaccttcctccactggcccctctaactctgaacatccgcagcccgctctggaccctaggtctaatgacttggcaagggttcctctgaagctcagcgtgcctgcatcagatggcttcccacctgcaggaggttctgcagtgcagaggtggcctccatcgtgggggctgcctgccatggattcctggccccctgaggatccttggcagatgatggctgctgcggctgaggaccgcctgggggaagcgctgcctgaagaactctcttacctctccagtgctgcggccctcgctccgggcagtggccctttgcctggggagtcttctcccgatgccacaggcctctcacccgaggcttcactcctccaccaggactcggagtccagacgactgccccgttctaattcactgggagccgggggaaaaatcctttcccaacgccctccctggtctctcatccacagggttctgcctgatcacccctggggtaccctgaatcccagtgtgtcctggggaggtggaggccctgggactggttggggaacgaggcccatgccacaccctgagggaatctggggtatcaataatcaacccccaggtaccagctggggaaatattaatcggtatccaggaggcagctggggaaatattaatcggtatccaggaggcagctgggggaatattaatcggtatccaggaggcagctgggggaatattcatctatacccaggtatcaataacccatttcctcctggagttctccgccctcctggctcttcttggaacatcccagctggcttccctaatcctccaagccctaggttgcagtggggctagagcacgatagagggaaacccaacattgggagttagagtcctgctcccgccccttgctgtgtgggctcaatccaggccctgttaacatgtttccagcactatccccacttttcagtgcctcccctgctcatctccaataaaataaaagcacttatggaaaaaaaaaaa

SEQ ID NO: 2218 - DNA, 6039 bp, Homo sapiens
tctcgcaggcagggctgggccgggcaggagctgcgaggccggcacaagggaggcggccctggggacctgacagggcgggggcgggggcgggcacgccgccgcctgcgcggttccgggtgctcccggcgcggcgctgcccagggcacacttgaccgaggtcgggctgcggggaaaggcgggtctggggagaaccccgagagacgcggcgtcctccaactcctcctccttctcctcgcggccgccgaagccacagcccgagcccgagcccgagcccgagccggcgccaccgcgcccccggccatggcttttgccaatttccgccgcatcctgcgcctgtctaccttcgagaagagaaagtcccgcgaatatgagcacgtccgccgcgacctggaccccaacgaggtgtgggagatcgtgggcgagctgggcgacggcgccttcggcaaggtttacaaggccaagaataaggagacgggtgctttggctgcggccaaagtcattgaaaccaagagtgaggaggagctggaggactacatcgtggagattgagatcctggccacctgcgaccacccctacattgtgaagctcctgggagcctactatcacgacgggaagctgtggatcatgattgagttctgtccagggggagccgtggacgccatcatgctggagctggacagaggcctcacggagccccagatacaggtggtttgccgccagatgctagaagccctcaacttcctgcacagcaagaggatcatccaccgagatctgaaagctggcaacgtgctgatgaccctcgagggagacatcaggctggctgactttggtgtgtctgccaagaatctgaagactctacagaaacgagattccttcatcggcacgccttactggatggcccccgaggtggtcatgtgtgagaccatgaaagacacgccctacgactacaaagccgacatctggtccctgggcatcacgctgattgagatggcccagatcgagccgccacaccacgagctcaaccccatgcgggtcctgctaaagatcgccaagtcggaccctcccacgctgctcacgccctctaagtggtctgtagagttccgtgacttcctgaagatagccctggataagaacccagaaacccgacccagtgccgcgcagctgctggagcatcccttcgtcagcagcatcaccagtaacaaggctctgcgggagctggtggctgaggccaaggccgaggtgatggaagagatcgaagacggccgggatgagggggaagaggaggacgccgtggatgccgcctccaccctggagaaccatactcagaactcctctgaggtgagtccgccaagcctcaatgctgacaagcctctcgaggagtcaccttccaccccgctggcacccagccagtctcaggacagtgtgaatgagccctgcagccagccctctggggacagatccctccaaaccaccagtcccccagtcgtggcccctggaaatgagaacggcctggcagtgcctgtgcccctgcggaagtcccgacccgtgtcaatggatgccagaattcaggtagcccaggagaagcaagttgctgagcagggtggggacctcagcccagcagccaacagatctcaaaaggccagccagagccggcccaacagcagcgccctggagaccttgggtggggagaagctggccaatggcagcctggagccacctgcccaggcagctccagggccttccaagagggactcggactgcagcagcctctgcacctctgagagcatggactatggtaccaatctctccactgacctgtcgctgaacaaagagatgggctctctgtccatcaaggacccgaaactgtacaaaaaaaccctcaagcggacacgcaaatttgtggtggatggtgtggaggtgagcatcaccacctccaagatcatcagcgaagatgagaagaaggatgaggagatgagatttctcaggcgccaggaactccgagagcttcggctgctccagaaagaagagcatcggaaccagacccagctgagtaacaagcatgagctgcagctggagcaaatgcataaacgttttgaacaggaaatcaacgccaagaagaagttctttgacacggaattagagaacctggagcgtcagcaaaagcagcaagtggagaagatggagcaagaccatgccgtgcgccgccgggaggaggccaggcggatccgcctggagcaggatcgggactacaccaggttccaagagcagctcaaactgatgaagaaagaggtgaagaacgaggtggagaagctcccccgacagcagcggaaggaaagcatgaagcagaagatggaggagcacacgcagaaaaagcagcttcttgaccgggactttgtagccaagcagaaggaggacctggagctggccatgaagaggctcaccaccgacaacaggcgggagatctgtgacaaggagcgcgagtgcctcatgaagaagcaggagctccttcgagaccgggaagcagccctgtgggagatggaagagcaccagctgcaggagaggcaccagctggtgaagcagcagctcaaagaccagtacttcctccagcggcacgagctgctgcgcaagcatgagaaggagcgggagcagatgcagcgctacaaccagcgcatgatagagcagctgaaggtgcggcagcaacaggaaaaggcgcggctgcccaagatccagaggagtgagggcaagacgcgcatggccatgtacaagaagagcctccacatcaacggcgggggcagcgcagctgagcagcgtgagaagatcaagcagttctcccagcaggaggagaagaggcagaagtcggagcggctgcagcaacagcagaaacacgagaaccagatgcgggacatgctggcgcagtgtgagagcaacatgagcgagctgcagcagctgcagaatgaaaagtgccacctcctggtagagcacgaaacccagaaactgaaggccctggatgagagccataaccagaacctgaaggaatggcgggacaagcttcggccgcgcaagaaggctctggaagaggatctgaaccagaagaagcgggagcaggagatgttcttcaagctgagcgaggaggcggagtgcccaaacccctccaccccaagcaaggccgccaagttcttcccctacagttctgcggatgcttcttaacaaccgcccggggctgtggctggcagcttggtgggccccagggccttctccttcattctctgtgaacatgtaactcaggaccccttttccctcttgcgtctgtgccagctcaaatccagcccctcgccctgtgccaccccaactgtgcctgatagacctgccccagcgttcctgacttcttgctggcctgtggagggtgaggtgtaattatttgtcacctgaacctaatgtatattctccttgagccccagatcccttcaagctggaagggatggggctgttggtggggtcagggtccaagaggaatgggtgttctgtggcctcgagtcctctcctgtttgcgaaaataccagttttgctctctgtgggacaaagcactgctgatgaagtccccgtgggctcatccgggctggaattcttggtttttcagccattccctgcagagtcactcaatcatcaagtccctcacagccatttctgttcccagaggagccaggcctgcagctggctgctcaggagatggcctcattcctcctgttctcccagtttgctttccacttaagacaaagccttgtctatgtggggggcggggaccggggaaagagggaggctgaaatgtttattctgcttctcccgtgtttcatgccatctcgcgtcccccttcctgcacatgggtgtgaatgcacacacatacgcgtacacacaggacttggtctgctggcctggcctcttctgcccaggtgggttggaacacgtttgctgcctgagcctgtgccactgagcatgttaggtggagcagttggtgtggcacgtgcggggtgttggcaccggaggcatggaaaagcacaggctgtactgccaggctgcgatgcgtgctggcccccgcacaggctcctgtgtgcagggactgattcctcagcacacgaggcttccacaacccagtctgctccatagcactctggcccaccctgtctgcaggtgaaacaggagggctgtttgcctctgccccatccccccgactgtgttcaggagtcccaccttgcatttcagacctgggctggcagtctgttggacttctcttcaggaagaaaaagcatcagggggaaatggaatgcccctgccccaggaacatggcagaagcacaggttctgtacctcagatggactcctgctgggccttcggggtctcagttggcttcccccagattctgattctacagctgcagaatgtatataacgcaataaaagcaaatgtttgaaccagtatgcgggtttacttacaaggaaaccttttttcaccctgatttctaattattttattgaaacaactataaaatgtatggtttctccaggaagatatctgctttttaaaacaacaaacaagaacaacaacacaaaactggtaatgatttggagtaatcatgcgggcatattgagtctgggtagtgtttcgctggtggtagagtggttgagacttcctgggaggactttttccgccttcactcctacagatttaagattctttatttttaggccgggcatggtgactcacctgaggtgaggagttcgagactagcctggccaacatggcaaaaccctgtctctactaaaagtacaaaaattagccaggcgtggtggtgcatgcctataatcccagctactcgggaggctgaggcaggagaatcgcttgaacccaggaggcagaggttgcagtaagccaaggtcacaccactgcactccagcctaggtgacagggcgagactctgtctctcaaaaaaaaaaaaaaaaaaaattctttgagacagggtctctaatatgttgcccaagctgatctcaaactcgtggctcaactgattctcccgcttcaaccttgagtagctgggacgacagatacatgctactgcacccagctaggttaaggttctgtatactctgtctttctaaagcaattccctggaaattttctcaacattggttataactgaatgcttgggaagggaggggcagcccttcaacaggaaaaggggactgcccaaatcttaaatgcacagtcaagattctcttggagctagcaatggttctcaggttagtgagcatttagcttgcctgctgcagaatttgacccagatgggggtgttttttaggtctctcacaaatgagacaagcgaaacaattgtctccttttattctctttggtgcattggtgctggggaaacatgaactagcggcagtgtaactgcagaacatagacccagttctaccaggccaggccagcgttgggaaccaccagacagggctgctttgggctttgcttacagtatttccatgtgtagcctggcgtgtgagaaagtattaggtgaaatgccagtttcatggttcaggtgaaagtctgtgatcattcccctcgtggctcgtccttcacatcacttttgcccttcaaggagttgccgcgtccccgctcagtgccgcctgagccctcagagctcccctgtgcttttctggatggggactggcggggtcacctagcctcaccgtggagccaccgtgcaatgcccatctctgagaggcccacgcggtattcctcgtgccctgtgttagtgctttctgtataagggacagacagaactgggtttttttcctctgtctggttttagagtaaatgtaactaacttttattttccctttatgaaagatagaaattatttttatgtagtttccagactttatacaaaatttttgtaaaatgttctctggaaagttaactacaagaatgtaaatatgcttctaataaaataacaaggttatttgccgttaaaaaaaaaaaaaaaaaaaa

SEQ ID NO: 2219 - DNA, 3286 bp, Homo sapiens
gcgtgtcgggcgcggaagggggaggcggcccggggcgcccgcgagtgaggcgcggggcggcgaagggagcgcgggtggcggcacttgctgccgcggccttggatgggctgggcccccctcgccgctccgcctcctccacacgcgcggcggccgcggcgagggggacgcgccgcccggggcccggcaccttcgggaaccccccggcccggagcctgcggcctgcgccgcctcggccgccgggagccccgtggagcccccgccgccgcgccgccccgcggaccggacgctgagggcactcggggcggggcgcgcgctcgggcagacgtttgcggggaggggggcgcctgccgggccccggcgaccaccttgggggtcgcgggccggctcggggggcgcccagtgcgggccctcgcgggcgccgggcagcgaccagccctgagcggagctgttggccgcggcgggaggcctcccggacgcccccagccccccgaacgctcgcccgggccggcgggagtcggcgccccccgggaggtccgctcggtcgtccgcggcggagcgtttgctcctgggacaggcggtgggaccggggcgtcgccggagacgcccccagcgaagttgggctctccaggtgtgggggtcccggggggtagcgacgtcgcggacccggcctgtgggatgggcggcccggagaagactgcgctcggccgtgttcatacttgtccgtgggcctgaggtccccggaggatgacctagcactgaaaagccccggccggcctccccagggtccccgaggacgaagttgaccctgaccgggccgtctcccagttctgaggcccgggtcccactggaactcgcgtctgagccgccgtcccggacccccggtgcccgccggtccgcagaccctgcaccgggcttggactcgcagccgggactgacgtgtagaacaatcgtttctgttggaagaagggtttttcccttccttttggggtttttgttgccttttttttttcttttttctttgtaaaattttggagaagggaagtcggaacacaaggaaggaccgctcacccgcggactcagggctggcggcgggactccaggaccctgggtccagcatggaggtggtggacccgcagcagctgggcatgttcacggagggcgagctgatgtcggtgggtatggacacgttcatccaccgcatcgactccaccgaggtcatctaccagccgcgccgcaagcgggccaagctcatcggcaagtacctgatgggggacctgctgggggaaggctcttacggcaaggtgaaggaggtgctggactcggagacgctgtgcaggagggccgtcaagatcctcaagaagaagaagttgcgaaggatccccaacggggaggccaacgtgaagaaggaaattcaactactgaggaggttacggcacaaaaatgtcatccagctggtggatgtgttatacaacgaagagaagcagaaaatgtatatggtgatggagtactgcgtgtgtggcatgcaggaaatgctggacagcgtgccggagaagcgtttcccagtgtgccaggcccacgggtacttctgtcagctgattgacggcctggagtacctgcatagccagggcattgtgcacaaggacatcaagccggggaacctgctgctcaccaccggtggcaccctcaaaatctccgacctgggcgtggccgaggcactgcacccgttcgcggcggacgacacctgccggaccagccagggctccccggctttccagccgcccgagattgccaacggcctggacaccttctccggcttcaaggtggacatctggtcggctggggtcaccctctacaacatcaccacgggtctgtaccccttcgaaggggacaacatctacaagttgtttgagaacatcgggaaggggagctacgccatcccgggcgactgtggccccccgctctctgacctgctgaaagggatgcttgagtacgaaccggccaagaggttctccatccggcagatccggcagcacagctggttccggaagaaacatcctccggctgaagcaccagtgcccatcccaccgagcccagacaccaaggaccggtggcgcagcatgactgtggtgccgtacttggaggacctgcacggcgcggacgaggacgaggacctcttcgacatcgaggatgacatcatctacactcaggacttcacggtgcccggacaggtcccagaagaggaggccagtcacaatggacagcgccggggcctccccaaggccgtgtgtatgaacggcacagaggcggcgcagctgagcaccaaatccagggcggagggccgggcccccaaccctgcccgcaaggcctgctccgccagcagcaagatccgccggctgtcggcctgcaagcagcagtgaggctggccgcctgcagcccgtgtccaggagccccgccaggtgcccgcgccaggccctcagtcttcctgccggttccgcccgccctcccggagaggtggccgccatgcttctgtgccgaccacgccccaggacctccggagcgccctgcagggccgggcagggggacagcagggaccgggcgcagccctcccccctcggccgcccggcagtgcacgcggcttgttgacttcgcagccccgggcggagccttcccgggcgggcgtgggaggagggaggcggcctccatgcactttatgtggagactactggccccgcccgtggcctcgtgctccgcagggcgcccagcgccgtccggcggccccgccgcagaccagctggcgggtgtggagaccaggctcctgaccccgccatgcatgcagcgccacctggaagccgcgcggccgctttggttttttgtttggttggttccattttctttttttctttttttttttaagaaaaaataaaaggtggatttgagctgtggctgtgaggggtgtttgggagctgctgggtggcaggggggctgtggggtcgggctcacgtcgcggccgcctttgcgctctcgggtcaccctgctttggcggcccggccggagggcaggaccctcacctctcccccaaggccactgcgctcttgggaccccagagaaaacccggagcaagcaggagtgtgcggtcaatatttatatcatccagaaaagaaaaacacgagaaacgccatcgcgggatggtgcagacgcggcggggactcggagggtgccgtgcgggcgaggccgcccaaatttggcaataaataaagcttgggaagcttggacctgaaaaaaaaaa

SEQ ID NO: 2220 - DNA, 1682 bp, Homo sapiens
cttctctctggcccgagccaggtcagtccggcagtgcagatggcccatcccgggctctgggctcctagaccggggtgggccctgccaggagtgggcctgagcctcgcacgtcctctgaaactacgctatgctctgcttttgcggcgcgatgggcgtgggagcgggggctgcccaaagatgggctggggttggaggaagtggcccggtagccgctgtgtgtcctgaggccgtaaggcgcctgaccccacccctgaagctggcgacggagcagggcctgttttctctacactatagtcatgatccgctgggcccccagcgcatctcctggaagagcccactcaccctggacgagctcttcggtagcctcagaccgtccttgaagaggatgactgagacattatgggccacgcgctgtgtgtctgctctcggggaactgtcatcattgacaataagcgctacctcttcatccagaaactgggggagggtgggttcagctatgtggacctagtggaagggttacatgatggacacttctacgccctgaagcgaatcctgtgtcacgagcagcaggaccgggaggaggcccagcgagaagccgacatgcatcgcctcttcaatcaccccaacatccttcgcctcgtggcttactgtctgagggaacggggtgctaagcatgaggcctggctgctgctaccattcttcaagagaggtacgctgtggaatgagatagaaaggctgaaggacaaaggcaacttcctgaccgaggatcaaatcctttggctgctgctggggatctgcagaggccttgaggccattcatgccaagggttatgcccacagagacttgaagcccaccaatatattgcttggagatgaggggcagccagttttaatggacttgggttccatgaatcaagcatgcatccatgtggagggctcccgccaggctctgaccctgcaggactgggcagcccagcggtgcaccatctcctaccgagccccagagctcttctctgtgcagagtcactgtgtcatcgatgagcggactgatgtctggtccctaggctgcgtgctatatgccatgatgtttggggaaggcccttatgacatggtgttccaaaagggtgacagtgtggcccttgctgtgcagaaccaactcagcatcccacaaagccccaggcattcttcagcattgcggcagctcctgaactcgatgatgaccgtggacccgcatcagcgtcctcacattcctctcctcctcagtcagctggaggcgctgcagcccccagctcctggccaacatactacccaaatctgaaaaagcagcatgttgagaagatggccccttgtgccttggaaagaggttcccatccctcattggaatcaccacccattccatccaggacttctcttacacttgggggtagcggggtcaggacaatcatctcagtcctgcatcttttcttctgctttcttccctccaagagcaaaacctgggcaaggggacttactgagtgggggtgggtgggggttgggaaaagggaaactggtgggatatggaacatggctctgagcaggactgttgagctcacatagtgttctgactccaaatctgggagcaggagaatgtgtaaacaagaataaagtggaagcaggttggtgtagaaaaaaaaaaaaaaaaaa

SEQ ID NO: 2221 - DNA, 1440 bp, Homo sapiens
gatgatgtcagcactgcttccggtcggtggcgcttctctctggcccgagccagcatgatccgctgggcccccagcgcatctcctggaagagcccactcaccctggacgagctcttcggtagcctcagaccgtccttgaagaggatgactgagacattatgggccacgcgctgtgtgtctgctctcggggaactgtcatcattgacaataagcgctacctcttcatccagaaactgggggagggtgggttcagctatgtggacctagtggaagggttacatgatggacacttctacgccctgaagcgaatcctgtgtcacgagcagcaggaccgggaggaggcccagcgagaagccgacatgcatcgcctcttcaatcaccccaacatccttcgcctcgtggcttactgtctgagggaacggggtgctaagcatgaggcctggctgctgctaccattcttcaagagaggtacgctgtggaatgagatagaaaggctgaaggacaaaggcaacttcctgaccgaggatcaaatcctttggctgctgctggggatctgcagaggccttgaggccattcatgccaagggttatgcccacagagacttgaagcccaccaatatattgcttggagatgaggggcagccagttttaatggacttgggttccatgaatcaagcatgcatccatgtggagggctcccgccaggctctgaccctgcaggactgggcagcccagcggtgcaccatctcctaccgagccccagagctcttctctgtgcagagtcactgtgtcatcgatgagcggactgatgtctggtccctaggctgcgtgctatatgccatgatgtttggggaaggcccttatgacatggtgttccaaaagggtgacagtgtggcccttgctgtgcagaaccaactcagcatcccacaaagccccaggcattcttcagcattgcggcagctcctgaactcgatgatgaccgtggacccgcatcagcgtcctcacattcctctcctcctcagtcagctggaggcgctgcagcccccagctcctggccaacatactacccaaatctgaaaaagcagcatgttgagaagatggccccttgtgccttggaaagaggttcccatccctcattggaatcaccacccattccatccaggacttctcttacacttgggggtagcggggtcaggacaatcatctcagtcctgcatcttttcttctgctttcttccctccaagagcaaaacctgggcaaggggacttactgagtgggggtgggtgggggttgggaaaagggaaactggtgggatatggaacatggctctgagcaggactgttgagctcacatagtgttctgactccaaatctgggagcaggagaatgtgtaaacaagaataaagtggaagcaggttggtgtagaaaaaaaaaaaaaaaaaa

SEQ ID NO: 2222 - DNA, 1632 bp, Homo sapiens
gtcctccaaatgcagtgaggttaggaaggacgtctgcgctcagatcaagaatccagttacctcaaagctccccaacttccacctccgcagagctatgacgtcatggcaggcacgccagaggccgaaggatgcaaaagtggttttctgctttcgatgatgcaatcattcagcgacagtggcgggcaaacccctcccggggcgggggaggtgtgagcttcacgaaggaggttgacaccaacgtggccaccggcgcccctccacgccgccaacgagtccccgggcgtgcgtgcccttggagggagccaatccgcggccggcgtggggcccggcctggcggaggtgatgctggagggacgcccggggagaccgtacgtcactgctctgcgccggaagaccctattttcaggttctcttccctccattcctaccccttccccggtaccataaaatcccgggatatgagctggaagaggcatcacctgatcccggagacctttggagttaagaggcggcggaagcgagggcctgtggagtcggatcctcttcggggtgagccagggtcggcgcgcgcggctgtctcagaactcatgcagctgttcccgcgaggcctgtttgaggacgcgctgccgcccatcgtgctgaggagccaggtgtacagccttgtgcctgacaggaccgtggccgaccggcagctgaaggagcttcaagagcagggggagatcagaatcgtccagctgggcttcgacttggatgcccatggaattatcttcactgaggactacaggaccagagtatgtgactgtgtcctcaaggcctgtgatggccgaccgtatgctggggcagtgcagaaatttctagcttcagtacttccagcctgtggggaccttagtttccagcaggaccaaatgacacagacctttggcttcagggactcagaaatcacgcatctggtgaatgctggagtcctcaccgtccgagatgctgggagctggtggctagctgtgcctggagctgggagattcatcaagtactttgttaaagggcgccaggctgtccttagcatggtccggaaggcaaagtaccgggaactgctcctatcagagctcctgggccggcgggcgcctgtcgtggtgcggcttggcctcacctaccatgtgcacgacctcattggggcccagctagtggactgcatctctaccacttcaggaaccctcctccgcctgccagagacatgaagattctgctcatcattgctcagctcctcagagtgggccgggaggggactagaagagctgcatgatggtggctgagacagggtcaccttgggaaggcttgggagccaggatgagtgtcgggctctcgtgtgtgcaaaaggtcagatgtgactgctgctgtttgcctggtttctgacccagtggtggggtttgagcaatgcttctctgcccttccatggaaagtggaaccagaaatggtgccaaggctgtggctgttccctttcgtgtaaaatggtgctgttattactctgtcttgaaataggaaggtgggatttctggggaggctggtgaaggagggcagggttcttttctctacgtgtcatgttaaaattgccaaataaagtacctctgcctgtga

SEQ ID NO: 2223 - DNA, 1620 bp, Homo sapiens
gtcctccaaatgcagtgaggttaggaaggacgtctgcgctcagatcaagaatccagttacctcaaagctccccaacttccacctccgcagagctatgacgtcatggcaggcacgccagaggccgaaggatgcaaaagtggttttctgctttcgatgatgcaatcattcagcgacagtggcgggcaaacccctcccggggcgggggaggtgtgagcttcacgaaggaggttgacaccaacgtggccaccggcgcccctccacgccgccaacgagtccccgggcgtgcgtgcccttggagggagccaatccgcggccggcgtggggcccggcctggcggaggtgatgctggagggacgcccggggagaccgtacgtcactgctctgcgccggaagaccctattttcaggttctcttccctccattcctaccccttccccggtaccataaaatcccgggatatgagctggaagaggcatcacctgatcccggagacctttggagttaagaggcggcggaagcgagggcctgtggagtcggatcctcttcggggtgagccagggtcggcgcgcgcggctgtctcagaactcatgcagctgttcccgcgaggcctgtttgaggacgcgctgccgcccatcgtgctgaggagccaggtgtacagccttgtgcctgacaggaccgtggccgaccggcagctgaaggagcttcaagagcagggggagatcagaatcgtccagctgggcttcgacttggatgcccatggaattatcttcactgaggactacaggaccagagtcctcaaggcctgtgatggccgaccgtatgctggggcagtgcagaaatttctagcttcagtacttccagcctgtggggaccttagtttccagcaggaccaaatgacacagacctttggcttcagggactcagaaatcacgcatctggtgaatgctggagtcctcaccgtccgagatgctgggagctggtggctagctgtgcctggagctgggagattcatcaagtactttgttaaagggcgccaggctgtccttagcatggtccggaaggcaaagtaccgggaactgctcctatcagagctcctgggccggcgggcgcctgtcgtggtgcggcttggcctcacctaccatgtgcacgacctcattggggcccagctagtggactgcatctctaccacttcaggaaccctcctccgcctgccagagacatgaagattctgctcatcattgctcagctcctcagagtgggccgggaggggactagaagagctgcatgatggtggctgagacagggtcaccttgggaaggcttgggagccaggatgagtgtcgggctctcgtgtgtgcaaaaggtcagatgtgactgctgctgtttgcctggtttctgacccagtggtggggtttgagcaatgcttctctgcccttccatggaaagtggaaccagaaatggtgccaaggctgtggctgttccctttcgtgtaaaatggtgctgttattactctgtcttgaaataggaaggtgggatttctggggaggctggtgaaggagggcagggttcttttctctacgtgtcatgttaaaattgccaaataaagtacctctgcctgtga

SEQ ID NO: 2224 - DNA, 4539 bp, Homo sapiens
ggagccaggctgcagtggtggggaggaccgggcaggtccagatgactttgaagggactccagaggaaggagagagtggaggaggagggctttgggttagggagagtgctttcgtttgttttaaatgggagaaactggagcatgttgccaagggcagagagccagcagagaggggtgaatggaagaaggagcgagaagggggttactgacgaagccttatcctggaggagagaaggatggactccagagcccagctttggggactggccttgaataaaaggagggccactctacctcatcctggagggagcacgaacctaaaggcagacccagaagagctttttacaaaactagagaaaattgggaagggctcctttggagaggtgttcaaaggcattgacaatcggactcagaaagtggttgccataaagatcattgatctggaagaagctgaagatgagatagaggacattcaacaagaaatcacagtgctgagtcagtgtgacagtccatatgtaaccaaatattatggatcctatctgaaggatacaaaattatggataataatggaatatcttggtggaggctccgcactagatctattagaacctggcccattagatgaaacccagatcgctactatattaagagaaatactgaaaggactcgattatctccattcggagaagaaaatccacagagacattaaagcggccaacgtcctgctgtctgagcatggcgaggtgaagctggcggactttggcgtggctggccagctgacagacacccagatcaaaaggaacaccttcgtgggcaccccattctggatggcacccgaggtcatcaaacagtcggcctatgactcgaaggcagacatctggtccctgggcataacagctattgaacttgcaagaggggaaccacctcattccgagctgcaccccatgaaagttttattcctcattccaaagaacaacccaccgacgttggaaggaaactacagtaaacccctcaaggagtttgtggaggcctgtttgaataaggagccgagctttagacccactgctaaggagttattgaagcacaagtttatactacgcaatgcaaagaaaacttcctacttgaccgagctcatcgacaggtacaagagatggaaggccgagcagagccatgacgactcgagctccgaggattccgacgcggaaacagatggccaagcctcggggggcagtgattctggggactggatcttcacaatccgagaaaaagatcccaagaatctcgagaatggagctcttcagccatcggacttggacagaaataagatgaaagacatcccaaagaggcctttctctcagtgtttatctacaattatttctcctctgtttgcagagttgaaggagaagagccaggcgtgcggagggaacttggggtccattgaagagctgcgaggggccatctacctagcggaggaggcgtgccctggcatctccgacaccatggtggcccagctcgtgcagcggctccagagatactctctaagtggtggaggaacttcatcccactgaaattcctttggcatttggggttttgtttttccttttttccttcttcatcctcctccttttttaaaagtcaacgagagccttcgctgactccaccgaagaggtgcgccactgggagccaccccagcgccaggcgcccgtccagggacacacacagtcttcactgtgctgcagccagatgaagtctctcagatgggtggggagggtcagctccttccagcgatcattttattttattttattacttttgtttttaattttaaccatagtgcacatattccaggaaagtgtctttaaaaacaaaaacaaaccctgaaatgtatatttgggattatgataaggcaactaaagacatgaaacctcaggtatcctgctttaagttgataactccctctgggagctggagaatcgctctggtggatgggtgtacagatttgtatataatgtcatttttacggaaaccctttcggcgtgcataaggaatcactgtgtacaaactggccaagtgcttctgtagataacgtcagtggagtaaatattcgacaggccataacttgagtctattgccttgcctttattacatgtacattttgaattctgtgaccagtgatttgggttttattttgtatttgcagggtttgtcattaataattaatgcccctctcttacagaacactcctatttgtacctcaacaaatgcaaattttccccgtttgccctacgccccttttggtacacctagaggttgatttcctttttcatcgatggtactatttcttagtgttttaaattggaacatatcttgcctcatgaagctttaaattataattttcagtttctccccatgaagcgctctcgtctgacatttgtttggaatcgtgccactgctggtctgcgccagatgtaccgtcctttccaatacgattttctgttgcaccttgtagtggattctgcatatcatctttcccacctaaaaatgtctgaatgcttacacaaataaattttataacacgcttattttgcatactccttgaaatgtgactcttcagaggacagggcacctgctgtgtatgtgtggccgtgcgtgtgtactcgtggctgtgtgtgtgtgatgagacactttggaagactccagggagaagtccccaggcctggagctgccgagtgcccaggtcagcgccctggactgcttgcgcacttgctcaccgagatgatgcagttggaggttgctgatctgtgcgattgctgtagcggttgccggggaccttaagagttattttgcttctctggaaggggcctatgcttgctaggcaggcagccagtgtgtctgtttttcttggtttgctgtgggaccttgcttggcgagggggaaaatctctgggtttctggagtgggagggttcgtgcagcagctgttgactggtacatgaagcattcttttatgtttgttgaagctgatgattgacatctcccgtgggtgtgccagttcttgtggagttaagacaggatttttggaagcaaggaagttagtgggtgagcttggggatgtagctcagctatctgctggtctagtggcctctaagctatagggaggggacagagccctgagctacagatgcttgagtgggttattgtgtcggtttgctagtgcagtctggtttttaagctctaaaattgaggtattttattagaagtggatttgggttgaactcttaatttgtataagggatatattttggttggggaaatagaactgagttgctaattcttattgtactcattactccatacaagaatgttatgttgaataataaaattggagaagatttcattttgtgtttccagggagtattctgtgtggggaactgtttccttacgtgaggccggcggcataagtcaaagatgagttttgtccttgcgaatcacacagattgagtctgtgttccccagggtgtgccgttacctgatttttaagtgagccagggcggacagcagcttttctgatttacagagttcttcagatttacaaatggacaatgacatcacagtttttagcactgaagccagtctcatgctagtaacagtgggtgagccgctcgagggactgggttctaatgaatactggtatgaacggggagtctctgcagtcgccagacaaatcatactcagccccttcccccgtagagcaacaagtggttcttttagagttgactggcagcatttcctgtcgggggaggtggggtttgatggagttagaaagctcgcctctgtgtacattctctcctgggctgttactttctgtagacgcacaaaatcagccccaatgtttttaagggcatcttagccaaggaagctggcttttgtgtcgccacttccaggcctgcattaagagagagcccaggcaccagggctaccactggaacctgcctcagcgtcaactgctgctggtctgtagccaggcccagcctttgagacgggtttactgtcaccagtagcctctcagtgccagccctgagctgctcctggctcagctgcccagagcctgcagcctggggaggtactcagcctctgggagacgagggccgtggactgggtggctggtagctcctgcgtttttgagctgtgtcctggctggctgctgccaatgaggtggacaccagtgtggtttggggtgcactggccacttcttgctgggttctgattttcttggaagtgcatctgccttccttatccaatagttttatccctgcattgctcttgtgaagtggctggtttggttctgtatgtagcattttgtacctttcctctggcaaaacactgtcagtttataaacattttttatatttccctcctttaaaaacagcttgtgtatttctgctataaaatgtgtcagcaaaggcagagtgacctaatagggcatgttcttaagcacagggactgtatcatgcaggggccaataaagctcaagaaaacgag

SEQ ID NO: 2225 - DNA, 4624 bp, Homo sapiens
tcggcgctcgcgggctcggcgggctgtgcgcgcccactccggctccagcggccagcgcgcgcgggcccaggccgcccggctccagcccagcagtagcggcagcagcggcggcggcggcagtgcgcgcgaggccctgcgcccccagcagctcctccctggcgccgtgcatggagacgcggcccgccacccgccgctgagcccccgccgcccggccgggacccgccagggctggggtggcctcgggctccggccggccccgccgcccgagggctgcgcgcggcccgcgggcctcgccgccccgcgcggatcgtcgcggcccggccgtcccgtcccaggaagtggccgtcctgagcgccatggctcactccccggtgcagtcgggcctgcccggcatgcagaacctaaaggcagacccagaagagctttttacaaaactagagaaaattgggaagggctcctttggagaggtgttcaaaggcattgacaatcggactcagaaagtggttgccataaagatcattgatctggaagaagctgaagatgagatagaggacattcaacaagaaatcacagtgctgagtcagtgtgacagtccatatgtaaccaaatattatggatcctatctgaaggatacaaaattatggataataatggaatatcttggtggaggctccgcactagatctattagaacctggcccattagatgaaacccagatcgctactatattaagagaaatactgaaaggactcgattatctccattcggagaagaaaatccacagagacattaaagcggccaacgtcctgctgtctgagcatggcgaggtgaagctggcggactttggcgtggctggccagctgacagacacccagatcaaaaggaacaccttcgtgggcaccccattctggatggcacccgaggtcatcaaacagtcggcctatgactcgaaggcagacatctggtccctgggcataacagctattgaacttgcaagaggggaaccacctcattccgagctgcaccccatgaaagttttattcctcattccaaagaacaacccaccgacgttggaaggaaactacagtaaacccctcaaggagtttgtggaggcctgtttgaataaggagccgagctttagacccactgctaaggagttattgaagcacaagtttatactacgcaatgcaaagaaaacttcctacttgaccgagctcatcgacaggtacaagagatggaaggccgagcagagccatgacgactcgagctccgaggattccgacgcggaaacagatggccaagcctcggggggcagtgattctggggactggatcttcacaatccgagaaaaagatcccaagaatctcgagaatggagctcttcagccatcggacttggacagaaataagatgaaagacatcccaaagaggcctttctctcagtgtttatctacaattatttctcctctgtttgcagagttgaaggagaagagccaggcgtgcggagggaacttggggtccattgaagagctgcgaggggccatctacctagcggaggaggcgtgccctggcatctccgacaccatggtggcccagctcgtgcagcggctccagagatactctctaagtggtggaggaacttcatcccactgaaattcctttggcatttggggttttgtttttccttttttccttcttcatcctcctccttttttaaaagtcaacgagagccttcgctgactccaccgaagaggtgcgccactgggagccaccccagcgccaggcgcccgtccagggacacacacagtcttcactgtgctgcagccagatgaagtctctcagatgggtggggagggtcagctccttccagcgatcattttattttattttattacttttgtttttaattttaaccatagtgcacatattccaggaaagtgtctttaaaaacaaaaacaaaccctgaaatgtatatttgggattatgataaggcaactaaagacatgaaacctcaggtatcctgctttaagttgataactccctctgggagctggagaatcgctctggtggatgggtgtacagatttgtatataatgtcatttttacggaaaccctttcggcgtgcataaggaatcactgtgtacaaactggccaagtgcttctgtagataacgtcagtggagtaaatattcgacaggccataacttgagtctattgccttgcctttattacatgtacattttgaattctgtgaccagtgatttgggttttattttgtatttgcagggtttgtcattaataattaatgcccctctcttacagaacactcctatttgtacctcaacaaatgcaaattttccccgtttgccctacgccccttttggtacacctagaggttgatttcctttttcatcgatggtactatttcttagtgttttaaattggaacatatcttgcctcatgaagctttaaattataattttcagtttctccccatgaagcgctctcgtctgacatttgtttggaatcgtgccactgctggtctgcgccagatgtaccgtcctttccaatacgattttctgttgcaccttgtagtggattctgcatatcatctttcccacctaaaaatgtctgaatgcttacacaaataaattttataacacgcttattttgcatactccttgaaatgtgactcttcagaggacagggcacctgctgtgtatgtgtggccgtgcgtgtgtactcgtggctgtgtgtgtgtgatgagacactttggaagactccagggagaagtccccaggcctggagctgccgagtgcccaggtcagcgccctggactgcttgcgcacttgctcaccgagatgatgcagttggaggttgctgatctgtgcgattgctgtagcggttgccggggaccttaagagttattttgcttctctggaaggggcctatgcttgctaggcaggcagccagtgtgtctgtttttcttggtttgctgtgggaccttgcttggcgagggggaaaatctctgggtttctggagtgggagggttcgtgcagcagctgttgactggtacatgaagcattcttttatgtttgttgaagctgatgattgacatctcccgtgggtgtgccagttcttgtggagttaagacaggatttttggaagcaaggaagttagtgggtgagcttggggatgtagctcagctatctgctggtctagtggcctctaagctatagggaggggacagagccctgagctacagatgcttgagtgggttattgtgtcggtttgctagtgcagtctggtttttaagctctaaaattgaggtattttattagaagtggatttgggttgaactcttaatttgtataagggatatattttggttggggaaatagaactgagttgctaattcttattgtactcattactccatacaagaatgttatgttgaataataaaattggagaagatttcattttgtgtttccagggagtattctgtgtggggaactgtttccttacgtgaggccggcggcataagtcaaagatgagttttgtccttgcgaatcacacagattgagtctgtgttccccagggtgtgccgttacctgatttttaagtgagccagggcggacagcagcttttctgatttacagagttcttcagatttacaaatggacaatgacatcacagtttttagcactgaagccagtctcatgctagtaacagtgggtgagccgctcgagggactgggttctaatgaatactggtatgaacggggagtctctgcagtcgccagacaaatcatactcagccccttcccccgtagagcaacaagtggttcttttagagttgactggcagcatttcctgtcgggggaggtggggtttgatggagttagaaagctcgcctctgtgtacattctctcctgggctgttactttctgtagacgcacaaaatcagccccaatgtttttaagggcatcttagccaaggaagctggcttttgtgtcgccacttccaggcctgcattaagagagagcccaggcaccagggctaccactggaacctgcctcagcgtcaactgctgctggtctgtagccaggcccagcctttgagacgggtttactgtcaccagtagcctctcagtgccagccctgagctgctcctggctcagctgcccagagcctgcagcctggggaggtactcagcctctgggagacgagggccgtggactgggtggctggtagctcctgcgtttttgagctgtgtcctggctggctgctgccaatgaggtggacaccagtgtggtttggggtgcactggccacttcttgctgggttctgattttcttggaagtgcatctgccttccttatccaatagttttatccctgcattgctcttgtgaagtggctggtttggttctgtatgtagcattttgtacctttcctctggcaaaacactgtcagtttataaacattttttatatttccctcctttaaaaacagcttgtgtatttctgctataaaatgtgtcagcaaaggcagagtgacctaatagggcatgttcttaagcacagggactgtatcatgcaggggccaataaagctcaagaaaacgag

SEQ ID NO: 2226 - DNA, 2826 bp, Homo sapiens
ccgcggagttacgggaaagttggtccgagttcccagagtttccctctgtggtgccctaggctcggccggccggtgccccggctcctttcctcctttcggccttcgccgtccaccaggtccctctctctgtccccggccgccatggagcagccgccggcgcctaagagtaaactaaaaaagctgagtgaagacagtttgactaagcagcctgaagaagtttttgatgtattagagaagcttggagaagggtcttatggaagtgtatttaaagcaatacacaaggaatccggtcaagttgtcgcaattaaacaagtacctgttgaatcagatcttcaggaaataatcaaagaaatttccataatgcagcaatgtgacagcccatatgttgtaaagtactatggcagttattttaagaatacagacctctggattgttatggagtactgtggcgctggctctgtctcagacataattagattacgaaacaagacattaatagaagatgaaattgcaaccattcttaaatctacattgaaaggactagaatatttgcactttatgagaaaaatacacagagatataaaagctggaaatattctcctcaatacagaaggacatgcaaaattggcagattttggagtggctggtcagttaacagatacaatggcaaaacgcaatactgtaataggaactccattttggatggctcctgaggtgattcaagaaataggctataactgtgtggccgacatctggtcccttggcattacttctatagaaatggctgaaggaaaacctccttatgctgatatacatccaatgagggctatttttatgattcccacaaatccaccaccaacattcagaaagccagaactttggtccgatgatttcaccgattttgttaaaaagtgtttggtgaagaatcctgagcagagagctactgcaacacaacttttacagcatccttttatcaagaatgccaaacctgtatcaatattaagagacctgatcacagaagctatggagatcaaagctaaaagacatgaggaacagcaacgagaattggaagaggaagaagaaaattcggatgaagatgagctggattcccacaccatggtgaagactagtgtggagagtgtgggcaccatgcgggccacaagcacgatgagtgaaggggcccagaccatgattgaacataatagcacgatgttggaatccgacttggggaccatggtgataaacagtgaggatgaggaagaagaagatggaactatgaaaagaaatgcaacctcaccacaagtacaaagaccatctttcatggactactttgataagcaagacttcaagaataagagtcacgaaaactgtaatcagaacatgcatgaacccttccctatgtccaaaaacgtttttcctgataactggaaagttcctcaagatggagactttgactttttgaaaaatctaagtttagaagaactacagatgcggttaaaagcactggaccccatgatggaacgggagatagaagaacttcgtcagagatacactgcgaaaagacagcccattctggatgcgatggatgcaaagaaaagaaggcagcaaaacttttgagtctaatttcctctctgtttttaactattctggagaccaagaaaccactaggaattgaaggaatatttggatatttttaatcctaagattttgccctacaattaggcagaggtcaaaaagtgacaatggtacatgcccaggtaaattcccaaaaggcagaattgacagttgtatctgctgtgcattcactctaagatgaggagaacaaaagaagtgtattctcttgttctgtcagctgcataccagtaataaaactgttatgaaatggattttcaaggtctctaaaccttgaaaatccaaagctattgttgcattgtacagcactgaagggctttatgttacaatattctttattcctatctagtatactaggctatttattgtatccccttaggtaaacttatttatttatgctattttgctttgtttcattttttaaggacaagatcaggatagctttggtgaaggtagggtcatattaatatgatgataatgtgcaaccaatttatactttctgcagggagctatggggtacattccttgatttccaggatagtttttcaaataggaaagcaataatggcagtagttctcaaatgggctaggccttttttatattgaagcaataattccatttttaccctttgaaattttgtttttttgatttttgatgtttggtacaaatagaactatatatatttaggtaaaatagatctatcgtgtttaaaaccaaagaaatcaatggaacccttgcacaaaaaagtgtgataaatatttttaaataaaaacttaatacaaatgtaatttgttaatattgtttcatgttttatgtgtagatctaatagctgaactgattcaaactgtaataagctcatcaatttcatttctatgaaaatgtgctctgttgtcacaggatgtttctgttgattttattcatttcctgggaattggtaaacatcatgttcctgatgataacccagtagcaaaaacatttgtactgagtggtacaagccttggggactgaaaaaaaaaagattaaaaccattaaaaagaaactcatttttacgctgaatgaacatttatatgattgcattgggaccagtcatttcctaagctacatatggccatcttgacagtgttttttcttttgtgtgtttaattattatgtgtaaatcataaagacaaataaatttcactgtgccacccagca

SEQ ID NO: 2227 - DNA, 3224 bp, Homo sapiens
gtcccacatcccgcatccggcatcccagcggccgggcatgtagcagcggcagcaacggcggaatatgggcgggaaccactcccacaagccccccgtgtttgacgagaatgaggaagtcaactttgaccattttcagattctgcgggccattggtaaagggagttttggaaaggtatgcatcgtgcagaagcgagacactaagaaaatgtatgcaatgaagtacatgaacaagcagaagtgcatcgagagggatgaggttcggaatgttttccgggagctgcagatcatgcaagggctggagcaccccttcctggtcaatctgtggtactccttccaggatgaggaggacatgttcatggtggtggacctgctcctgggaggcgacctgcgctaccatctgcagcagaatgtgcatttcacagaggggactgtgaaactctacatctgtgagctggcactggccctggagtatcttcagaggtaccacatcatccacagagacatcaagccagacaatatcctgctggatgaacacggacatgttcacattacagacttcaacatagcgacggtagtgaaaggagcagaaagggcttcctccatggctggcaccaagccctacatggctccagaagtattccaggtgtacatggacagaggccccggatactcgtaccctgtcgactggtggtccctgggcatcacagcctatgagctgctgcggggctggaggccgtacgaaatccactcggtcacgcccatcgatgaaatcctcaacatgttcaaggtggagcgtgtccactactcctccacgtggtgcaaggggatggtggccctgctgaggaagctcctgaccaaggatcctgagagccgcgtgtccagccttcatgacatacagagcgtgccctacttggccgacatgaactgggacgcggtgttcaagaaggcactgatgcccggctttgtgcccaataaagggaggttgaactgcgatcccacatttgagcttgaagagatgattctagaatccaagccacttcacaaaaagaagaagcgattggcaaagaacagatccagggatggcacaaaggacagctgcccgctgaatggacacctgcagcactgtttggagactgtccgggaggaattcatcatattcaacagagagaagctcaggaggcagcagggacagggcagccagctcttggacaccgacagccgagggggaggccaggcccaaagcaagctccaggacgggtgcaacaacaacctcctcacccacacctgcacccgtggctgcagcagctgagcccacacttgttgctgctcaacaggactgcactcgtctctgccctgcccacccagagcccctctttgtgccctgatggtccctgtctcacccctgaaaacatcagatgcagaaaaagccctggacttggagctgggaagcctgggttctggtcccatctccatgactgattcacgtgtgacctcagacaagtcacgccctctctgtgcctccgttttctgcatctgccaaaggggttaaacacttctgccccacttcaaattacaagattatggggagaacccaattaggtaggaaacatgaaaaacctttgatatttataaaatcatttttacgtgcaaaatataaccttaatatttgaagtgacccccattccccaaagcaatcaaaccgtcatgactttgcaatttggcacatcctagcttgttagagggcacttccgaaaaacacagccctgacagcaaaataaaggtctgatatgttggccccttctatggaaacaacgctgccaaatcctggagcaaaacctgaagtgtcttcatgtgcattctctggcaggccacagtcctgagcttgtaagatggtgcagcatgcagaccagacttgtccccaaggtctcagcgctgcggtctcactcctcccctcatttaagaagactatccttaccttttagtttcagcagtcctcaccaccaccatatccccagtgctgggatggcacacaggtgtccattcagatgagagttgggtcgctgagcattggttactcctgcagagtgtaatcagcaccccatccaactggcccgaaagcccagacctgcagcagaactctccaactctctatcagctttcagggttttctctcctgggaagggtgtaaaatcagcttgtcagattcttcttacagagagtatccaatcggtattggtggagcggctccctatttatacaataggaagcatgggtgcttagaaagtttatttcaggaggaaaatgggttcacacaaaaagcaaactacattctgatctgctcagggagaagcttgcctttgaactggaagatgttgggatgagcagggaaagcttagactttggagtcaggtttgtgttcagaatccagccctgctggctactaactaactgggagaccttaggcaaagcatgcaatcgctctgaatggcagtttcctcatttttaaacagggataataaaactaatattgcaggggagttacagggttaaataagatcctgtgtgtaaccccaagcattggatgactcatagaatggccttttttgtcagcataatcgtcatcattatttagatactttcttccttcactcacccagcaggtcagttttctgtgcaaacaaacctgtttaggattcttccaaatgttcttcctggggtctttgatatttgtttgttacatcctgctgaagttcgactgtgtttttattttttcatccaacttccatttttcactttttacatgattactcaatccttggggctgtccatgtcatctcttagatttcttaaaagacattttaatgtatggttaggttttatatttttattttttaaaaaagaaatagtcagtgttttcctcctttcaaccgagactatttctggattgtgtgctcctcgtcagttgacttgttttgcacacttttctttacttcatgtccccatcaacaaccgtcctgctccccacctcccccaggaaataaggggcctgctcctctccctactgtgaccctggaggctcttaagatgatgatggttttttttattgggctgagttcacgaattaggggcaggagctggaagtcgccctaggaacaccagatttcctggttctgttcaagttggcatttcttgtttggaataaactatttcttggacattccttc

SEQ ID NO: 2228 - DNA, 2141 bp, Homo sapiens
ctacggggcgggttccaccgcccagaagagcgcacggcgggcgctgccggccccgagcgctcccgctaccactgccgctcccggccctgccggccggccatgccccgagttccggctgccgcgcgcacccagacccggcgatgaggagtggcgccgagcgcaggggcagcagcgccgcggcgtccccgggctcgccgccccccggccgcgcgcgccccgccggctccgacgcgccctcggccctgccgccgcccgctgctggccagccccgggcccgggactcgggcgatgtccgctcgcagccgcgccccctgtttcagtggagcaagtggaagaagaggatgggctcgtccatgtcggcggccaccgcgcggaggccggtgtttgacgacaaggaggacgtgaacttcgaccacttccagatccttcgggccattgggaagggcagctttggcaaggtgtgcattgtgcagaagcgggacacggagaagatgtacgccatgaagtacatgaacaagcagcagtgcatcgagcgcgacgaggtccgcaacgtcttccgggagctggagatcctgcaggagatcgagcacgtcttcctggtgaacctctggtactccttccaggacgaggaggacatgttcatggtcgtggacctgctactgggcggggacctgcgctaccacctgcagcagaacgtgcagttctccgaggacacggtgaggctgtacatctgcgagatggcactggctctggactacctgcgcggccagcacatcatccacagagatgtcaagcctgacaacattctcctggatgagagaggacatgcacacctgaccgacttcaacattgccaccatcatcaaggacggggagcgggcgacggcattagcaggcaccaagccgtacatggctccggagatcttccactcttttgtcaacggcgggaccggctactccttcgaggtggactggtggtcggtgggggtgatggcctatgagctgctgcgaggatggaggccctatgacatccactccagcaacgccgtggagtccctggtgcagctgttcagcaccgtgagcgtccagtatgtccccacgtggtccaaggagatggtggccttgctgcggaagctcctcactgtgaaccccgagcaccggctctccagcctccaggacgtgcaggcagccccggcgctggccggcgtgctgtgggaccacctgagcgagaagagggtggagccgggcttcgtgcccaacaaaggccgtctgcactgcgaccccacctttgagctggaggagatgatcctggagtccaggcccctgcacaagaagaagaagcgtctggccaagaacaagtcccgggacaacagcagggacagctcccagtccgagaatgactatcttcaagactgcctcgatgccatccagcaagacttcgtgatttttaacagagaaaagctgaagaggagccaggacctcccgagggagcctctccccgcccctgagtccagggatgctgcggagcctgtggaggacgaggcggaacgctccgccctgcccatgtgcggccccatttgcccctcggccgggagcggctaggccgggacgcccgtggtcctcaccccttgagctgctttggagactcggctgccagagggagggccatgggccgaggcctggcattcacgttcccacccagcctggctggcggtgcccacagtgccccggacacatttcacacctcaggctcgtggtggtgcaggggacaagaggctgtgggtgcaggggacacctgtggagggcatttcccgtgggcccccgagacccgcctagatggaggaagcgctgctgggcgccctcttaccgctcacggggagctggggccatggatgggacaggagtctttgtccctgctcagcccggaggctgtgcacggccctcgtcacaaggtgacccttgcagcacaggccgcgggtgccccaggctcggctcaggtcttggaggtcaagggcatgggttggggtagtgggtggggaggtgaatgttttctagagattcaaactgctccagcaatttctgtagttttcacctctgagaattacaatgtgagaaccgctaaaaaaaaaaaaaaaaaaaaaa

SEQ ID NO: 2229 - DNA, 6033 bp, Homo sapiens
atggaaacggggaaggacggcgcccgcagaggtacacaaagcccggagcggaaaaggcgaagcccagtgccgcgggcgcccagcacgaagctgaggccggcggcggcggcccgggccatggatccggtggcggccgaggccccgggcgaggccttcctggcgcggcgacggcctgagggcggtggcgggtccgcgcggccgcgttacagcctgttggcggagatcgggcgcggcagctacggcgtggtttatgaggcagtggccgggcgcagcggggcccgggtggcggtcaagaagatccgctgcgacgcccccgagaacgtggagctggcgctggctgaattctgggccctcaccagcctcaagcggcgccaccagaacgtcgtgcagtttgaggagtgcgtcctgcagcgcaatgggttagcccagcgcatgagtcacggcaacaagagctcgcagctttacctgcgcctggtggagacctcgctgaaaggagaaaggatcctgggttatgctgaggagccctgctatctctggtttgtcatggagttctgtgaaggtggagacctgaatcagtatgtcctgtcccggaggccagacccagccaccaacaaaagtttcatgctacagctgacgagcgccattgccttcctgcacaaaaaccatattgtgcacagggacctgaagccagacaacatcctcatcacagagcggtctggcacccccatcctcaaagtggccgactttggactaagcaaggtctgtgctgggctggcaccccgaggcaaagagggcaatcaagacaacaaaaatgtgaatgtgaataagtactggctgtcctcagcctgcggttcggacttctacatggctcctgaagtctgggagggacactacacagccaaggcggacatctttgccctgggcattatcatctgggcaatgatagaaagaatcacttttattgactctgagaccaagaaggagctcctggggacctacattaaacaggggactgagatcgtccctgttggtgaggcgctgctagaaaacccaaagatggagttgcacatcccccaaaaacgcaggacttccatgtctgaggggatcaagcagctcttgaaagatatgttagctgctaacccacaggaccggcctgatgcctttgaacttgaaaccagaatggaccaggtcacatgtgctgcttaaaattcagggctaagcattttgggtgattttaaactaggtcgattcctcgggacccacagtctcaccacgtctcctccagaggacggcagagggtacaggtggtggcctggccggttggcgatctcccgacagctggatccggcaatgtgaagcttttgtttgggtttccccgcttctttttagttttgctttatttttttccttttcttttcttttttttttttcctctttcctttttttaaatttaaaccattgagacttcagaagagcaggacacaatgctgtggacaggcaccaatttctttaaagaaattcaatgtgggcaaggcatatgtgtaaatttcacttttactttttataaggggttagggagctatttttggttttgtccttcactttccctctgtcttccttctttatacttttctcagttctacttatgacacctcacttccctagagaaggcctgcctccccatagggaatctgggggtttcttctggaacggggcgtgaggacacaaggaggcctctgggccacgcctccctaccagatgcaggaactcctggactccttggtgggctggccctggctagcccttgggcctcggagatgatcagaggtgaagaaccgcctggaagaggaaggccagggtttggccaggagaactaagaaggtctcaactccaggctttgttgtgtttaagctattgagagccccaggccacaccaggacttgcagtggtgggaatccattcctcttctgccctgtgttgcagggaactaggaggtaagggtggagggcgaccatctcgctcttgctggcggtggagcagccatccctgcctttctgttgggaaaaactgttgtgccaaactcttgtgtggaacacagctgggtcttcagcaggcatctgtcactgccgtgaggtcagcgcttctcacctaactgcctcctggattgtcatcttcccagatgtgtcccatagtgtccaggtgtcacagagacggcctgaggccctaagatctggttgtgactttgccatgataacagggtgtcctgaactggctgccgttgtcgtgttctcacagtgaagggcgtgccctgtgtgccggggtccatggtgtcatatgcagtgacacacactgtcaagcgccatttccctcacccctggagacttactgttaggtgcctgccctcagtatagacgtatccaatgggaaaacagcggacctgcccagagcagggaggtgtcgtggaactgggtagaccccctgcagcgttaggggcccatttgtgggctcgccaccttcaggcttccccagccatgacacttcagccccgccacccatgcctgtctgctgcagccatccttgcactctccagcgacactctcgcacctccctaggggaagcttccctccccctgggctgctgctctgagcccatctgttctccccctgcaagaaggggcaatgctcttgtgttgtccctctgtctggacgcgcctggccactccgaaggcttttcaccccattatggccaaatagtatagggccactggggagggggaagggaatcattttgtgttcatttttgttttctgtttcacctaaaccagcataggattgataggggagacggttggcgggcatttccgtttctatgtgaccaaggcagcaggggcttttacctgctaagcggcaatcctttggccctgagaatttgggagagaacagtgcatcaggccaggctcagcaatatgtttgctcacattctttcagccttctgtcacccccctcaacaccaaactttcttccttgtgagcagaaggttggctgctgttagcaggatcccacagtgataaccaggcccttcccttcctaagccaaaacccattgtgactgcctgtctctcctgtctctgacttctcaggcagcctcctgagtgcactgagttgtatccgagagggtgggaacagcagcatcccctaattgcagtacacggttccttttccgcccgccaccctgcctttccttgggggcagctgtctctctgtacatgagcaaatgggcaaaaacagtccccaaacccagcacccccctctccctggctgcagcccacactgtaacatccctagtgaggctccagcctaatgagccccttattttcttttttttccctccccaggtctagtagctctaactaaaaagttcttggagccatcgtgctccccctttgttatttttcttgctatcagagtagcaagaaacagcacccctgtaggtgacaggtgggcagcctggtaggggtcgccagcctccatgccccctcatcttccagttcttgcttagtggcacgacctctttccatagcataaatgcaggccagcgttttagccccaagtgcctgcccttgcttcttacccctcccctgctttctcaaacacttgcccacctcaggcactcagcgggctccgccgtggtgagagaactggccgtggctcagccccgggtagcacctgtagtttcagtgccactctccactgtccccttgtggaccagcttccactcactgtcacgtcccccctcctgcgtcttcactgggtctcaggctgccagcagctctctggtgcatcgtctcaacaccaccaagtttgtaggacctgcccaagttctagtagtattcaaaacttcaaacggcagtcatttgttctcctcggctctgtggcaaggatagccctttggagggggactcttgacctcggctgttagggatctgaacttggttttcccgtcagaagaatcagcaggacagatcgtagtgccttattccattgtcctcccctggccaggcctcctggctcagctggaagtgcatggcttctttctccctatctgtgtcctctgtcacttgctctttcactctctctctcattcccagagagccacgggggagggatcaccctcacccccaacaccctcttcctgagggctgtagccaggtccgcatctccccaccaccaccagggcactcactcgcagctatagcccaggacagaaaaactgtgctttggacaggtgcacactctctgcctcttacctctagccaggaggatgcctcagtctgttcattcgagactggccccgtctgaaccttctctgggcactggggactaaggttgcaggccttagcctcgtctcgtcccagaggcattggatcaggagaatgggaatttttttcctcccacctggacatagtttgcccctgtggctgcctttctgagggagtatactaaatgtttacttaagaaacaccctgtttacagccagaggagaaacacccaacactgagtggagatttgactctggacagggcctggcctccttagtggcactgccggggggccccagagcgaatgagggcagagatgcccggggcaggggcaaacgccctccgctccctctgctcccaaccctgtggtgctaggaccactccccgccttccctacggcctcctcgccctgcacattccccacctccacattcccctcctccaagatctcagctccttaacatatcagttgtctcctagcctagaaaaccagtgtttggagcaataagatgattatttttgcttgaatctttttctaagagaaggaaaagagctggcattgtgggaattttctttttatgctgttagctgtttaccttcttagaagacatcctaataggatggatgtctgggttttagccttggggtatcttttggaaacttagaaaagcaggagtcaggctgccaccccctaaggagggaccctaacgttctgcccttgcctggttccatatggctccttccagccctgcccaccaagtgcagctcccactttccatcctgcccatacgcccctcttcccccgacatctgggggcgctggtggcacttactctaggttggtctcagactatccctccccttggctggttttccctcctaggcctgtctggcagcccccagacagacgtagctcctgggagtctcggccctggcaaccttggaagagccaagctgacattgtttagctcttcaggccactgggttttggaggcagaagtccagagatactggctctgccaagctgtcgtactgggctgtggcacagccttcgagacaacacgggtgtatctctgatcctgccctacctaggcttcaaggggcttctgtctggagaaatgccctcaaagggtaaccagtaggtgtggcattgaattggccagtgttagcatctacagccatcaccgagatgagtccactgccgttgcctgcccgagggccccctaaggttatagacggtatcagcagggaggccgtcccgctggttttctaggagagcccacaggaggaagggagcctcttcaggggcactggaatcttttgtgccaggggcttcttttcatcagagccggggagtacattgcagtgacttcttaaacatttgtgtgggacagacgagcgtgagggaggttttaagccaggcacaaagttagtttccaatactagttaataaatctatttttcttcatttcctttttttgcacagaagctggtaatctaggacctacgtgtgaacaactttatatgaatattttttgtacttggtttacttgggttggtatgatacattatatttaagttccttgaacactgtggatcccctaatgtgtatgaatgactgaggctttgtaaattaagggacgtttgtgtgaataaagttatttgatggggtcaaagaagccatatgtgatttgaaaaaaaaaaaaaaaaaaaaaaa

SEQ ID NO: 2230 - DNA, 2346 bp, Homo sapiens
acaaggcagcctcgctcgagcgcaggccaatcggctttctagctagagggtttaactcctatttaaaaagaagaacctttgaattctaacggctgagctcttggaagacttgggtccttgggtcgcaggtgggagccgacgggtgggtagaccgtgggggatatctcagtggcggacgaggacggcggggacaaggggcggctggtcggagtggcggagcgtcaagtcccctgtcggttcctccgtccctgagtgtccttggcgctgccttgtgcccgcccagcgcctttgcatccgctcctgggcaccgaggcgccctgtaggatactgcttgttacttattacagctagaggcatcatggaccgatctaaagaaaactgcatttcaggacctgttaaggctacagctccagttggaggtccaaaacgtgttctcgtgactcagcaatttccttgtcagaatccattacctgtaaatagtggccaggctcagcgggtcttgtgtccttcaaattcttcccagcgcattcctttgcaagcacaaaagcttgtctccagtcacaagccggttcagaatcagaagcagaagcaattgcaggcaaccagtgtacctcatcctgtctccaggccactgaataacacccaaaagagcaagcagcccctgccatcggcacctgaaaataatcctgaggaggaactggcatcaaaacagaaaaatgaagaatcaaaaaagaggcagtgggctttggaagactttgaaattggtcgccctctgggtaaaggaaagtttggtaatgtttatttggcaagagaaaagcaaagcaagtttattctggctcttaaagtgttatttaaagctcagctggagaaagccggagtggagcatcagctcagaagagaagtagaaatacagtcccaccttcggcatcctaatattcttagactgtatggttatttccatgatgctaccagagtctacctaattctggaatatgcaccacttggaacagtttatagagaacttcagaaactttcaaagtttgatgagcagagaactgctacttatataacagaattggcaaatgccctgtcttactgtcattcgaagagagttattcatagagacattaagccagagaacttacttcttggatcagctggagagcttaaaattgcagattttgggtggtcagtacatgctccatcttccaggaggaccactctctgtggcaccctggactacctgccccctgaaatgattgaaggtcggatgcatgatgagaaggtggatctctggagccttggagttctttgctatgaatttttagttgggaagcctccttttgaggcaaacacataccaagagacctacaaaagaatatcacgggttgaattcacattccctgactttgtaacagagggagccagggacctcatttcaagactgttgaagcataatcccagccagaggccaatgctcagagaagtacttgaacacccctggatcacagcaaattcatcaaaaccatcaaattgccaaaacaaagaatcagctagcaaacagtcttaggaatcgtgcagggggagaaatccttgagccagggctgccatataacctgacaggaacatgctactgaagtttattttaccattgactgctgccctcaatctagaacgctacacaagaaatatttgttttactcagcaggtgtgccttaacctccctattcagaaagctccacatcaataaacatgacactctgaagtgaaagtagccacgagaattgtgctacttatactggttcataatctggaggcaaggttcgactgcagccgccccgtcagcctgtgctaggcatggtgtcttcacaggaggcaaatccagagcctggctgtggggaaagtgaccactctgccctgaccccgatcagttaaggagctgtgcaataaccttcctagtacctgagtgagtgtgtaacttattgggttggcgaagcctggtaaagctgttggaatgagtatgtgattctttttaagtatgaaaataaagatatatgtacagacttgtattttttctctggtggcattcctttaggaatgctgtgtgtctgtccggcaccccggtaggcctgattgggtttctagtcctccttaaccacttatctcccatatgagagtgtgaaaaataggaacacgtgctctacctccatttagggatttgcttgggatacagaagaggccatgtgtctcagagctgttaagggcttatttttttaaaacattggagtcatagcatgtgtgtaaactttaaatatgcaaataaataagtatctatgtctaaaaaaa

SEQ ID NO: 2231 - DNA, 6377 bp, Homo sapiens
tccgcctcacattatctgcccaagcacagtgctgttggccaagcctccagcagctgacgggacccagctgtagtgaggttgcagtgattgagtaggattggcctgcttcaaagcagaggtttctcatgggaatatgcttattaaactcccactggtgcagaaaccatgaacagaggatgaacaagtgaagttgcaatctcctccatcacagctcagttccccaacaacaggatcacaagctggagatgcctttaaggaagatgaagatccctttcctcctactgttctttctgtgggaagccgagagccacgcagcatcaaggccgaacatcatcctggtgatggctgacgacctcggcattggagatcctgggtgctatgggaacaaaactatcaggactcccaatatcgaccggttggccagtgggggagtgaaactcactcagcacctggcagcatcaccgctgtgcacaccaagcagggcagccttcatgactggccggtaccctgtccgatcaggaatggcatcttggtcccgcactggagttttcctcttcacagcctcttcgggaggacttcccaccgatgagattacctttgctaagcttctgaaggatcaaggttattcaacagcactgatagggaaatggcaccttgggatgagctgtcacagcaagactgacttctgtcaccaccctttacatcacggcttcaattatttctatgggatctctttgaccaatctgagagactgcaagcccggagagggcagtgtcttcaccacgggcttcaagaggctggtcttcctccccctgcagatcgtcggggtcaccctccttacccttgctgcactcaattgtctggggctactccacgtgcctctaggcgtttttttcagccttctcttcctagcagccctaatcctgacccttttcttgggcttccttcattacttccggcccctgaactgcttcatgatgaggaactacgagatcattcagcagcccatgtcctatgacaatctcacccagaggctaacggtggaggcggcccagttcatacagcggaacactgagactccgttcctgcttgtcttgtcctacctccacgtgcacacagccctgttctccagcaaagactttgctggcaaaagtcaacacggagtctacggggatgctgttgaggaaatggactggagtgtggggcagatcttgaaccttctggatgagctgagattggctaatgataccctcatctacttcacatcggaccagggagcacatgtagaagaagtgtcttccaaaggagaaattcatggcggaagtaatgggatctataaaggaggaaaagcaaacaactgggaaggaggtatccgggttccaggcatccttcgttggcccagggtgatacaggctggccagaagattgatgagcccactagcaacatggacatatttcctacagtagccaagctggctggagctcccttgcctgaggacaggatcattgatggacgtgatctgatgcccctgcttgaaggaaaaagccaacgctccgatcatgagtttctcttccattactgcaacgcctacttaaatgctgtgcgctggcaccctcagaacagcacatccatctggaaggcctttttcttcacccccaacttcaaccccgtgggttccaacggatgctttgccacacacgtgtgcttctgtttcgggagttatgtcacccatcacgacccacctttactctttgatatttccaaagatcccagagagagaaacccactaactccagcatccgagccccggttttatgaaatcctcaaagtcatgcaggaagctgcggacagacacacccagaccctgccagaggtgcccgatcagttttcatggaacaactttctttggaagccctggcttcagctgtgctgtccttccaccggcctgtcttgccagtgtgatagagaaaaacaggataagagactgagccgctagcagcgcctggggaccagacagacgcatgtggcaaagctcaccatcttcactacaaacacgcctgagagtggcactggggaaacataactccatctacaccttggatttggactgattctccattttatcacctgaaggcttgggccagagctcaacagctactcaactggaggggtgagggggataaggtctgtagtatacagacaggaagatggtaggtttatgccttctgtggccagagtcttggactcatggaaatagaatgaatagaggggcattcacaaggcacaccagtgcaagcagatgacaaaaaggtgcagaaggcaatcttaaaacagaaaggtgcaggaggtaccttaactcacccctcagcaaatacctatgtcaacagtataagttaccatttactctataatctgcagtgatgcaataaccagcataataaaaaggcaatcacataaaaaagagtttagtcgtctaaacataagtaactttaaggtgaatgaaagatcttctttaggaataatagatgatggtaagttccactttggttattggaaggcaagtcattattactggtattagttaaaacacatatcaaatgcttgctcttcatcatatatatagttatgcatacatacacacacacacatacagtatattctttcctcaaaagggttaagatgtctaaaatagggacctagaagcttaacactatttaagtaaatacagtagaagctcacaaatagatttctttgcacaatgattttttgcaaaattttacagtaataataatcccaaggcaaatctctcctgaactgctttccattccataatttgtagtataattcttggattccactgttttctttggggaatggaagttctgaattaaaagcccactgtggagatgctgtggttcatggaatctcttccagtgtaattcagaatcattggcctagaaagtctctgatatttggaggggaacaaaaatcactcacaagcaatccatgatctatacacataagcataatttcctttagttctagttagtcatcagagaacagtcatgtatgcaagttttgtgactgagaaatttctgtgcttccaatccacaatgagatgcatgattttgttttcatcccatttcccccaagcccctgtaaatcagggaaaatgcgcaactgatcgcctaggagagggcctcgtagtggcacagctggagatagtttcaaagtctaaaccaccagcccatcctgaggaaagcctcctatggaatgtaaagtgcaatcatttcttcagatataagactttccccaacaatgtgattggattcctttatggcaaaatcgagagaagctgccatccacctgcttatgcatttatctcttttgtggacttgtctgaccaccttctatttgcccagagtttgctcaattccaagacagtgcccatgaatgggacacctgtaatgtaacccacacagcggtttgcagagaatgttagccatgacttgggctttctgaaagttggctataatttctctatccctacccacaaccctgggaagttggagcaagaggggcatactattgggctgggaggatttgacagcatttccccagttgccctttaagttcttctatttcaaacgttaattttgcttctctttctaaaaaaaaaaaaaaaaaagaaagagaagaaagaagtgattcctaccccctacctccagagttgttgaaagctgaaaagcatacaagattcttccttttaacttggatttctcgttccagaaattgtgggataatctgtattcttgctttagaaaacattcttagagagggtactagcttactgatgatgtgttaggattgctactgatgctgtcatgtggaaactatttaaaggcactattataaatttatcctataagatgacaatgtttactcaaagtctaacatattcaatgcaagtaagactttctgaaaacacttgatgatgtggaaatgctgcaggattaaataacttgaagagcctttatagattatatgaatgcctatttgtgtctagaaccagttatttaacctgtaaaatgtcaatagcaaatgaaggatgaagtatatctctagatgcaaatacattgagtttaaaagtgcctcaaaataattgagatcacatttcaggacatttggaaatcaggtcgatttgtggtaactgtagtcatcttaaatttcaaaccatttaccatctgaaagttttgatttgaatgtaaaacaggaaattggaattcctttgtccaggagaaacctcacaaaccttctttaaggcatagttttgttgtttgtttgcttgtttgttgcaggctgtaaggcatggctgcttgtttacaaagcatctcattcatattacctgtggagttgcatatccaaaccttagtgagttttgaagctttaagcaaattcttttaaaaaattcttgtatttctagcattactagatattaaaagttaagcaaatagattaatgacgtatacataggcatcatttcacaaggtcagtaatgctgcaggaaaagcaaaattgcaatctacgtatctatggtactaaggaagtcctgtttttcaaaaatggaagcccacttctcagatttttctgaagggcatacaatgaaaagtgaaggggaaacacacacacacaaaaaaacaagtatttggcttgtcacaggaatctgattgcattaagtgaaaggattatttagaatatgttaatgcaaagctaaaataaaattttccttggcaattaaaaatgctgtgcgctaataccctgctttctatcgtgactcaattcaacaatgtggggaatgtttactacatttccaacttgatgtcaagcaatggggaatacaagttccagttctgcaaagattcgtcaactttcttagctcaagagagaggctgagaaatgcagagaagaataagacataaaatagctccgacctccatgatccgagagtgggaaaaggcccgattattacccataaggcacactctctaaggccttttaaggggcctacaaaaatgttttattttataatcagaagaaaaggaaatgaacattggggattgaaaatcatattggtatttgcaccaacatagtcataaaatagtatgttaatatgtttttactttatatatttatatattaaaatatatttaatatgttttgcctttgtggcccatgaaagtcttactgggccctggggaaggtatcctaccctggtgaagcagctgctttgctctacaaatacctggggcagaaatttgatttgaaaagtattattctctcttctctttgtttcaactggattcctttggaaaaccaaactagtatcagaacaaaccccgaaacagtaagaaattggagtgagaagggcatggtattgggactaggatcggctctcattcgatcgagctattctcttaaaatgacaaaaagtgtccataaagaggctgctggagagtgcgtggccatagggagccgacatgcccgggaggaaaggtgttgattacatggatacttctaaaagctaaagccttgttgccttctctttaatgcctagagaatgggatgtgtgatgcaaatgctcaaaacctcttaaatcatagctgtctgacctctacggacctcacatccatctgaggcttcatggacaaagattctccacttggccaaactttagccaagctcctcaaccttctcccaggcccaatctgggcacttccttgtaaaatctagttttggcaagaagtctattaggtcagtttagcaagaacacctaacccccccatatctgttcaacctcagtatctgatcaggctcctcagcctccaccatcccccaggtgatgtctggtcaactggcctgccttcagctagaatcctgttaggtcggtttagatgaatgctccctgatatttcctcttggtaatcttccatccactgcccctgaccctgttccctgtctataaatccccagttttccatggtgtattcagagctgagtccagtctctctcccctactacaagtccccattgctgtggtccccgtacctgtcatgatggtcctaaataaagtcttactgtgctttaataggtagcattgaaaaatttttttctttgacatcattcatgacaacatgaaacctattgggacagcatgactgtgcagggtctttagagctcagctttctgaggccctgagcattcttggttttccgacatcgtgaacctgttctgtgttgcaagatatcactcaagccagtgttgcttaataccatctctttgtgtaatagatctgaataaagtaattgtaatacaccaa

SEQ ID NO: 2232 - DNA, 1815 bp, Homo sapiens
gcggccgctcgcccctcggggaatatggcgccctcggggctgaaggcggtggtgggggaaaaaattctgagcggagttattcggagtgtcaagaaggatggggagtggaaggtgcttatcatggatcacccaagcatgcgcatcttgtcttcctgctgcaaaatgtcagatatcctggctgagggcatcaccattgttgaagacatcaacaaacggcgggaacccattcccagtctggaggccatttatttgctgagccccacggagaagtcggttcaggccctgatcaaagacttccaggggaccccgactttcacctacaaagcggcccatatcttcttcaccgacacctgccccgagcccctgttcagtgagctaggccgctctcgtctggcaaaggtggtgaagacgttgaaggagattcaccttgccttcctcccctacgaggcccaggtgttctccctcgatgctccccacagcacctacaacctctactgccccttccgggcagaggagcgcacgcggcagctcgaggtgctggcccagcagattgccacgctgtgcgccaccctgcaggagtacccggccatccgctaccgcaagggcccagaggacacagcccagttggcccacgccgtcctggccaagctgaacgccttcaaggcagacactcccagtctgggcgagggcccagagaaaacccgctcccagctgctgataatggaccgggcagctgaccccgtgtccccactactgcatgagctcacgttccaggccatggcgtatgatctgctggacatagagcaggacacatacaggtatgagaccaccgggctgagcgaggcgcgggagaaggccgtcttgctggacgaggacgatgacttgtgggtggagcttcgccacatgcatatcgcagatgtgtccaagaaggtcacggagctcctgaggaccttctgtgagagcaagaggctgaccacggacaaggcgaacatcaaagacctatcccagatcctgaaaaagatgccgcagtaccagaaggagctgaataagtattctacgcacctgcatctagcagatgattgtatgaagcacttcaagggctcggtggagaagctgtgtagtgtggagcaggacctggccatgggctccgacgcagagggggagaagatcaaggactccatgaagctgatcgttccggtgctgctggacgcggcggtgcccgcctacgacaagatccgggtcctgctgctctacatcctccttcggaatggtgtgagtgaggagaacctggccaagctgatccagcatgccaatgtacaggcgcacagcagcctcatccgtaacctggagcagctgggaggcactgtcaccaaccccgggggctcggggacctccagccggctggagccgagagaacgcatggagcccacctatcagctgtcccgctggaccccggtcatcaaggatgtaatggaggacgccgtggaggaccggctggacaggaacctgtggcccttcgtatccgaccccgcccccacggccagctcccaggccgctgtcagtgcccgcttcggtcactggcacaagaacaaggctggcgtagaagcccgggcgggcccccggctcatcgtgtatgtcatgggcggtgtggccatgtcagagatgagggccgcctacgaggtgaccagggccaccgagggcaagtgggaggtgctcattggctcctcacacatcctcaccccgacccgcttcctggatgacctgaaggcactggacaagaagctggaggacattgccctgccctgacgcggccgc

SEQ ID NO: 2233 - DNA, 6046 bp, Homo sapiens
aggtggcagcgcttgcagtcgggctacggaggccgggttgccagattacgggaaagccatttaagaagttcctggaataatattagtcagagtaatataggatctgcaggaagtgtctcaagatagttggaaaagaagaatttctagactcttcatcaagatcttcatttatacagctgttaaatccaaggctactttggtgaaagcatgaataaaaatacatctactgtagtatcacccagtctacttgaaaaggatcctgcctttcagatgattacaattgccaaggaaacaggccttggcctgaaggtactaggaggaattaaccggaatgaaggcccattggtatatattcaggaaattattcctggaggagactgttataaggatggtcgtttgaagccaggagatcaacttgtctcagtcaacaaggaatctatgattggtgtatcatttgaagaagcaaaaagcataattaccggagccaagttgaggttagaatctgcttgggagatagcattcataagacaaaaatccgacaacattcagccagaaaatctgtcatgtacatcacttatagaagcttcaggagaatatggacctcaagcctcaacattaagtcttttttcttctcctcctgaaatactaatcccaaagacctcatccactcccaaaacaaataatgacattttatcttcttgtgagataaaaactggatacaacaaaacagtacagattccaattacttcagaaaacagtactgtgggtttgtctaatacagatgttgcttctgcctggactgaaaattatgggctacaagaaaagatctccctaaatccctctgttcgctttaaggcagagaaactggaaatggctctaaattatcttggtattcagcccacaaaggaacaacaccaagccctgagacagcaagtacaagcagactcaaaagggacagtgtcttttggagattttgtccaggttgccagaaacttgttttgcttgcagttggatgaagtaaatgttggtgcacatgaaatttccaatatattagattcacagcttcttccttgtgattcttcagaagcagatgaaatggaaaggctcaagtgtgaaagagatgatgccttgaaagaagtaaatacacttaaggaaaaattattggaatcagataagcaaaggaaacaattgacagaagagctccagaatgtgaaacaagaagccaaagctgtagttgaagaaacaagagccctgcgtagtcggattcatcttgctgaagctgctcagagacaggcacatggaatggaaatggactatgaagaagtgatccgtctgttagaggccaagattacagagctaaaggctcagcttgctgattattctgaccaaaataaagaaagtgttcaggatttaaaaaagagaatcatggtactcgactgccaattacgaaaatcagaaatggctcgaaaaacttttgaggcatccactgaaaagcttcttcattttgtagaggctattcaagaagtattttctgataattctactcctttatcaaatttaagtgaaagaagagctgtgttagcttctcagacttccctcacaccactgggaaggaatggacgtagcatcccagcaacgctggcgcttgaatctaaggaacttgttaaatctgttcgtgccttacttgatatggattgtttaccttatgggtgggaggaagcttacacagcagatggaatcaagtacttcatcaatcatgtaacacagactacatcctggatccatcccgtgatgagtgtcctgaatctatctcgctcagaggagaatgaagaggattgctctagagaactccccaaccagaaaagttgatggttttccttaggaagtggagctacatggatgatgtgagcagagacgcataacatccaattctgagatgaaacagtctaaaataggagtaaagcatgcactacttgttgaagtgtgaaatggagactctggactttgggtatttttgtaaaacttttgatatttctgtatacatttaaaaaatcaattgccactacagtagttccttaagaataatctagttatattttttgaaatcacatataattagactttataatatatatactttttcatatataattagatctttctttgtaatttcatatgtagttcttcatagggtctcagatacaatggtttttataattgacatattgaaaaagtatatgaacataatgaaacacctcatttatttgataattcactaatgttttatattcatatattaggaaagtgaacttagcaagctttttggaatttaaggatcacatttagacatctcatgggctgatgaatacagctggtatctttgtggagctttctaatttacaaaatgctttgtagaccccattgtctttaaaccatacaacatgcccgtgaagctgatctggtgggtatgtttattcttggttttcagtagggaaatagcagttcagagagaggaagctctctgtcccagcaccgagactcactcctaagtcttctgattccatgagcagtcccccttcccccataccctgctgtctccacggagggaggtcacagcccatcacgcaggacactgtgattgtgttgatgcagctggctccacagctgtgcattccacagagattcagaaggcacctcttcggtcaaacatggcccctctataaccccactattcttctcctataaacccttcccccttctctgcacccaagccttcgccaagtaggcgcactctttgtgatattgtttcagcagacttctttcagcagctcgtgtttttctaaagtgaaaggcatggtttgtcctgcttaggttgcccttcccagagggatggtttgaggggagctgatgagaagagaggtatctgttaaaacattactgctctactcgaaacaagatggaagcctaaagcccaagtcgagcagctcccagcactgctgtgcagacctagaggtccttagaacatagtctaagaaccattcattgtagccattttatagttgagtaaactgagatcttaagtctcctagtctactgaatttcatatggtgtataatacagatttatatggtaaagatatacatatacattgtgctcaactatacattcctgaatccatttaggatttgtgatttatgtcttgagtaataatataaagtcaactccagactgataggtagtcattagccatgagaaatgtttcaggatggctagggaagacttgtgttttgcctgacagccatttgaatgttaggaagcttcggggagacaagttttgagagaagccccagagggagctatttccttgcaccccccagaggtgaatgaggtattctataagttagtgtctataattgtgaaagtacaaacttcttgtttttgtcaaattaatggtatgaaatttctctccccctgcttgaagagttttctaattcgtttctagtgagcaaaacaaagaaggtgcttgagtcactgaaatcaaagtactcaggcacacagcccactgacaagagacacctcatccattaactgctgttttgtaccacttgccgccctgtttctgtcaaatacctagtgaaaaaggcctaaacaattgtaatgatattatttattgggcattttgtgccatacatggtgatgagcagtttgcatatatttatttatgatcttcttaaaaccattccatgaaataggaactgtaattatccccaattctaaaagaaaaaacttagttttagagagttagtaatctttgcctaagggtcacaaagcacctatgtgtagaagctagggttcaaggcagatctgtgattccagaagctgttctctaaaccactatggagaactgcttagattcattgtctatgggtacattttataaaaaggcagattctagttcagtgtcataaggaactttctagtaattagagctgataagaaaagaattccccaggagaaaatggaaacactatcccagcaatctgaattccttacttggggaatgttgctgaggaggttcagtgtgtgaatggactgaaccagttggccactctctcagattccctcttcataaagcttccgtgacttctaaaccatcaggtcggtgccataagagatgctcaaaaaagcatggtcagggcttagcaagaatccttttccagtgcaaatacgaccctcatattatgttttggcgagtagccagtctttctttaacatcaatcaaccgtagcaatgtggtcatcacgaagtcttcattgactcactggcttggattttagggttagaaaatctgaatgttcttatgtccttccgtctcactttactagagtgcccaagttgactcatccttactcactcattccctcaaaatatttattgagcaccaacaatgtcacaagcactgtgctaaacactgtggtgaagtagaacaattgctaatcatttcctgggttccacttactcttgatttaaaaaaaaaaaaacaacaaaagagtttgtgtgtggccaggactaaacagctgcttcttaatttttgaattttaaaactaatctattttatttaaaaaaaatcaagtactttggaagtgaataaagtaagagatagcctgtctcactttccagaggtagcagtcactaatactgtggtgagtgattttactcaaaggaaatcacactattaagcagcttggttttgacatgttatgttgtggtcatcttttcatgtcaatacatagattaatcttttatttcaaatgtctacataaaatatcactacccacataacctataatttgtgtggccagcaatttattgaacactaaaatgttttaagttttcttattgctaacaatgtcacagtgaacatttatatattcattaaatccttttcctcatgtatctttgcactcttgtgctagtatgtctatagtgtgaatacattcataaatttcttgatcaaagctaggtcaaagttacattcattttaattttggtacatatccataaattctccataaaagtaggaccaacttacattaccaccaatagtgtatgtgagccttatttttatgtatgataggactttttttagtccaaatgttcctatagattttctgggttttttttttttttttgtccttggaagaataaccttccttccaccaagtccaagaacctgagatttttaatcattaggttttagatttcctttagcagcagagactgacttgctgtatagagggaagtcaagtagtgactaactcactatatgtcaaacacatcattactcttctcttttcctactttacatgtaatggttgcgaggaccaactttcaaatgagctaacttgggtgagacgttcactaaagtaccaagcacaatacaaatgcatcttcgagttctttgggcctcactttccctatctgaataataaggatagtaatcccttgccttttctcaaaccagttcaactcagcaaacacttcctgagcacctgctacatgccaggcaaaatgtgaaatttgcatgctatgaggctaaatggtactgattctcaaaacaaggagctcatagtctaaaaccatttttctttcttttttttccccctaaacaacctcttaaaggggtaagaagttagggggttgtttattaagaacccctgaagagcaaccctttaccactctcttaaatttgaaaaattccaaaataatattaacacctcttgactagaaaaggaaaaaaaaggaacatgccgtatgaagagcctctccaataataaatgcaaagcagctgtcaaaatatagagtcaagtgatactttcataaagtgtttgcacaattagaaaatgttatcctttttctcgggagaaatgggacatttttattttctctgctaagtgaaatgcaactttttgaagaatcaacacgcttgacatttttacaatgtacataaagaactgaactattattaaaacaacttacacactcc

SEQ ID NO: 2234 - DNA, 2799 bp, Homo sapiens
agcttcgaggccagtgggaggagggaggggccaggcagctgagggccaggaaagatgtgaaaaactctagctggtgaccgagaggaggagtagagtgtgcccttagttcatatgaactagagggagttggtatttgcacagcagtcagggtcacatgagtgatcatggtacagtgagaagttctccctcccagggccaggtcacagggtttgtttctgttcaatccggattcttccagtaaaagcttcaacttcccacactgaagctgagagcctcccaaagtgctggctacctgctgagcgcccccgtaactctgacacagtagtaatttgagcctctgcaattgccgtctgcttcctgtgaaagtcctttccgtgcccactgacccttgagtgggcctttgagctgctgactttcagctggaacttgaagggaccccaaccctgagacactatggccctgacctcagacctggggaaacagataaaactgaaagaggtggaggggaccctcctgcagcctgcaactgtggacaactggagccagatccagagcttcgaggccaaaccagatgatctcctcatctgcacctaccctaaagcagggacaacgtggattcaggaaattgtggatatgattgaacagaatggggacgtggagaagtgccagcgagccatcatccaacaccgccatcctttcattgagtgggctcggccaccccaaccttctggtgtggaaaaagccaaagcaatgccctctccacggatactaaagactcacctttccactcagctgctgccaccgtctttctgggaaaacaactgcaagttcctttatgtagctcgaaatgccaaagactgtatggtttcctactaccatttccaaaggatgaaccacatgcttcctgaccctggtacctgggaagagtattttgaaaccttcatcaatggaaaagtggtttggggttcctggtttgaccacgtgaaaggatggtgggagatgaaagacagacaccagattctcttcctcttctatgaggacataaagagggacccaaagcatgaaattcggaaggtgatgcagttcatgggaaagaaggtggatgaaacagtgctagataaaattgtccaggagacgtcatttgagaaaatgaaagaaaatcccatgacaaatcgttctacagtttccaaatctatcttggaccagtcaatttcctccttcatgagaaaaggaactgtgggggattggaaaaaccacttcactgttgcccagaatgagaggtttgatgaaatctatagaagaaagatggaaggaacctccataaacttctgcatggaactctgagcaagatgtaaataaaattaaaaggtggatggcaagagtgcaaatactatcttcaatccttcagtcccagccagaagaatctctgaaagcatattgtgaatgtatacaatgtagtacaaacaatctctgtgatgattaacagtatgtcaccacttcattttttaaaaaggatcacgtctaatgcccattttcccaactattctttccaaagtaagatataaggtagcttaataaactaagtaaaacgtatgacttgagtacaaaaggattgttttaatccccattattctggaaagtgcatcctagtctcccagtctataacatcataataccttgagtataagtccaaatattaggttatatctatattaaaaacaaaatttctgtcatctgtcctggccattcaggcaactccagcctgggctcaatcctggagttctgtctggtcactatcagaaggaacactttgagggaaaccctggtgcagccagccctgaggaaacatggcctgagtgccctcactggtgggtgggaataaaatggaagtgcacagaggagatgtcagaagaccaaaacttggtgaatagtcccagtgctaggtcatataggaaacagaaagcatgacagtggccttttgggaacccaagttacgtcctggtgaaagcagaaaggaggagacaggatggctgtcaacaacgtcagcatgggcatggctcccaggcatggaggtaattgggtcttggcttcaatgccacccttttgggaagccctaaaccaagtgaggtgttcttttcccttgcttcccatatttgtcccagttgcagccctgttgttatgtatttactcttcaatttcttatttatacctctcactcaattgttaattctttgggttcagtctcatgccatatttactcctagtacctaatgcagtgcctggcacacagcaagtgcccttgagaacttgtagagggagtaaaaaagtgcatggataaatgactgcagcaaatcacaaattttgaactttgacccttttcttttagtcccaaatagtggcattccatagctgagggtagtaggagcagttcaccctgggagcagacaataagaggaagaatgaagccaactaaaattctgaatgctttttgttggatttcgtagggtattttttttaaaatagggtcttgctatgttgcccaggctggtcttaactgactgctttttattattaccatgcactggcaattccaaacaatgtcagtgttaaaatgcttctccctgaaaaagagaaaaaaaaaaggaaaaaaagaaaagaaaagtgaaaagaaaaactcttattggcctaagttctaaataatagctaggttaccactgagttttaactatatgtatatgagcttcaaataagcacctttttattatgtaaataaataaaagttatctgtatccccaaaaa

SEQ ID NO: 2235 - DNA, 2832 bp, Homo sapiens
agcttcgaggccagtgggaggagggaggggccaggcagctgagggccaggaaagatgtgaaaaactctagctggtgaccgagaggaggagtagagtgtgcccttagttcatatgaactagagggagttggtatttgcacagcagtcagggtcacatgagtgatcatggtacagtgagaagttctccctcccagggccaggtcacagggtttgtttctgttcaatccggattcttccagtaaaagcttcaacttcccacactgaagctgagagcctcccaaagtgctggctacctgctgagcgcccccgtaactctgacacagtagtaatttgagcctctgcaattgccgtctgcttcctgtgaaagtcctttccgtgcccactgacccttgagtgggcctttgagctgctgactttcagctggaacttgaagggaccccaaccctgagacactatggccctgacctcagacctggggaaacagataaaactgaaagaggtggaggggaccctcctgcagcctgcaactgtggacaactggagccagatccagagcttcgaggccaaaccagatgatctcctcatctgcacctaccctaaagcagggacaacgtggattcaggaaattgtggatatgattgaacagaatggggacgtggagaagtgccagcgagccatcatccaacaccgccatcctttcattgagtgggctcggccaccccaaccttctgagacaggatttcaccatgttgcccaggctggtctcaaactcctgagctcaagcaatccacctgcctcaacctcccaaagtgccaagattacagacctgctgccaccgtctttctgggaaaacaactgcaagttcctttatgtagctcgaaatgccaaagactgtatggtttcctactaccatttccaaaggatgaaccacatgcttcctgaccctggtacctgggaagagtattttgaaaccttcatcaatggaaaagtggtttggggttcctggtttgaccacgtgaaaggatggtgggagatgaaagacagacaccagattctcttcctcttctatgaggacataaagagggacccaaagcatgaaattcggaaggtgatgcagttcatgggaaagaaggtggatgaaacagtgctagataaaattgtccaggagacgtcatttgagaaaatgaaagaaaatcccatgacaaatcgttctacagtttccaaatctatcttggaccagtcaatttcctccttcatgagaaaaggaactgtgggggattggaaaaaccacttcactgttgcccagaatgagaggtttgatgaaatctatagaagaaagatggaaggaacctccataaacttctgcatggaactctgagcaagatgtaaataaaattaaaaggtggatggcaagagtgcaaatactatcttcaatccttcagtcccagccagaagaatctctgaaagcatattgtgaatgtatacaatgtagtacaaacaatctctgtgatgattaacagtatgtcaccacttcattttttaaaaaggatcacgtctaatgcccattttcccaactattctttccaaagtaagatataaggtagcttaataaactaagtaaaacgtatgacttgagtacaaaaggattgttttaatccccattattctggaaagtgcatcctagtctcccagtctataacatcataataccttgagtataagtccaaatattaggttatatctatattaaaaacaaaatttctgtcatctgtcctggccattcaggcaactccagcctgggctcaatcctggagttctgtctggtcactatcagaaggaacactttgagggaaaccctggtgcagccagccctgaggaaacatggcctgagtgccctcactggtgggtgggaataaaatggaagtgcacagaggagatgtcagaagaccaaaacttggtgaatagtcccagtgctaggtcatataggaaacagaaagcatgacagtggccttttgggaacccaagttacgtcctggtgaaagcagaaaggaggagacaggatggctgtcaacaacgtcagcatgggcatggctcccaggcatggaggtaattgggtcttggcttcaatgccacccttttgggaagccctaaaccaagtgaggtgttcttttcccttgcttcccatatttgtcccagttgcagccctgttgttatgtatttactcttcaatttcttatttatacctctcactcaattgttaattctttgggttcagtctcatgccatatttactcctagtacctaatgcagtgcctggcacacagcaagtgcccttgagaacttgtagagggagtaaaaaagtgcatggataaatgactgcagcaaatcacaaattttgaactttgacccttttcttttagtcccaaatagtggcattccatagctgagggtagtaggagcagttcaccctgggagcagacaataagaggaagaatgaagccaactaaaattctgaatgctttttgttggatttcgtagggtattttttttaaaatagggtcttgctatgttgcccaggctggtcttaactgactgctttttattattaccatgcactggcaattccaaacaatgtcagtgttaaaatgcttctccctgaaaaagagaaaaaaaaaaggaaaaaaagaaaagaaaagtgaaaagaaaaactcttattggcctaagttctaaataatagctaggttaccactgagttttaactatatgtatatgagcttcaaataagcacctttttattatgtaaataaataaaagttatctgtatccccaaaaa

SEQ ID NO: 2236 - DNA, 3798 bp, Homo sapiens
gtgcagaggtggcagttccgggcgccggggaggtgtagagaacagattcggaaactggggaggtctagcatgtggcgtaggagggggtcctcactccgcttcgcgattgccaaaacgagcctgccggaagcgccctaaggggttttcttctcccagggaaccagcggggaaactgaggctcggggtggagcgcaggattgtgggacgcgccaaggctgctgtctttcccagcagcagcggaagatgtcggacagcgaggacagcaacttttccgaggaggaggacagcgagcgcagcagtgacggcgaggaggccgaggtagacgaagagcggcggagtgcagcgggcagtgagaaagaagaagagcctgaggacgaagaggaggaggaagaggaggaggaatacgatgaggaagaggaggaagaagatgatgaccgaccccccaagaaaccccgccatggaggcttcattctggacgaggctgatgttgacgatgagtatgaggacgaggaccagtgggaggatggagcagaggacattctagagaaagaagagattgaagcctccaatatcgataatgttgtcctggatgaagatcgttctggggctcgccgcctgcaaaacctctggagggaccagcgagaagaagaactgggcgagtattacatgaagaaatacgccaagtcatctgtgggagagacggtgtatggaggatctgatgagctctcagacgacatcacccagcagcagctgctcccaggagtcaaggatcccaatctgtggactgtcaaatgtaagattggggaggaacgggccacggccatttccttgatgcgcaagttcattgcctaccagttcacagacacgcccctgcagatcaagtcagtagtggcaccagagcatgtgaagggctacatctacgtggaggcctacaagcagacccacgtgaagcaggccattgagggggtgggcaacctgcggcttggctactggaaccagcagatggtgcccatcaaggagatgacagacgtgctcaaagtggtgaaggaggtggccaacctgaaaccaaagtcctgggtccgcctcaagcggggcatctacaaggatgacattgctcaggtggactacgtggagcccagccagaacaccatctccctgaagatgatcccacgcatcgactacgatcgcatcaaggcccgcatgagcttgaaagactggtttgccaaaaggaagaagtttaagcggcctccacagaggctgtttgatgctgagaagatcaggtccctggggggtgatgttgcctctgatggtgacttcctcatctttgaggggaaccgttacagccggaagggctttctgttcaagagcttcgccatgtctgctgtgatcacggagggtgtgaagccaacactctctgagctggaaaagtttgaggaccagccagagggcattgacctggaggtggtgactgagagcacagggaaggagcgggagcacaacttccaacctggggacaacgtggaggtctgtgagggtgagctcatcaacctgcagggcaagatcctcagcgtggatggcaacaagatcaccatcatgcccaagcatgaggacctcaaggacatgttggagttcccagcccaggaacttagaaaatacttcaagatgggggaccacgtgaaggtgattgctggccgattcgagggcgacacaggcctcattgtgcgggtggaggagaatttcgttatcctgttctctgacctcaccatgcatgagctgaaggtgctcccccgggacctgcagctctgctcagagacagcatcaggtgtggatgttgggggccagcatgaatggggcgagctggtgcagctggatccccagactgtgggtgtcatcgtgcgactagaacgggagaccttccaggtgctgaacatgtacgggaaggtggtgactgtcagacatcaggctgtgacccggaagaaggacaaccgctttgctgtggccttggactcagagcagaacaacatccatgtgaaagacatcgttaaggtcattgatggcccccactcaggccgagaaggggagattcgccatctcttccgaagcttcgccttcctacattgcaagaaactggtggagaacgggggcatgtttgtctgcaagacccgccacctggtgctggctgggggctcaaagccccgtgatgtgaccaacttcaccgtgggtggctttgcgcctatgagtccccggatcagcagccccatgcaccccagtgctggaggtcagcgtggcggctttggtagcccaggtggcggcagtggtggcatgagcaggggccggggccggagggacaacgaactcatcggccagaccgtgcgcatctcccaggggccctacaaaggctacatcggtgtggtgaaagatgccacagagtccacggcccgtgtggagctgcactccacctgccagaccatctctgtggaccgtcagcggctcaccacggtgggctcacggcgcccgggcggcatgacctcgacctatgggaggacgcccatgtatggctcccagacgcccatgtatggctctggctcccgaacacccatgtacggctcacagacacccctccaggatggtagccgcaccccacactacggctcacagacgcccctgcatgatggcagccgcactcctgcccagagtggggcctgggaccccaacaaccccaacacgccgtcacgggctgaggaagaatatgagtatgctttcgatgatgagcccaccccgtccccgcaggcctatgggggaacccccaatccccaaacacctggctacccagacccctcgtccccacaggtcaacccacaatacaacccgcagacgccagggacgccggccatgtacaacacagaccagttctctccctatgctgccccctccccacaaggttcctaccagcccagccccagcccccagagctaccaccaggtggcgccaagcccagcaggctaccagaatacccactccccagccagctaccaccctacaccgtcgcccatggcctatcaggctagccccagcccgagccccgttggctacagtcctatgacacctggagctccctcccctggtggctacaacccacacacgccaggctcaggcatcgagcagaactccagcgactgggtaaccactgacattcaggtgaaggtgcgggacacctacctggatacacaggtggtgggacagacaggtgtcatccgcagtgtcacggggggcatgtgctctgtgtacctgaaggacagtgagaaggttgtcagcatttccagtgagcacctggagcctatcacccccaccaagaacaacaaggtgaaagtgatcctgggcgaggatcgggaagccacgggcgtcctactgagcattgatggtgaggatggcattgtccgtatggaccttgatgagcagctcaagatcctcaacctccgcttcctggggaagctcctggaagcctgaagcaggcagggccggtggacttcgtcggatgaagagtgatcctccttccttccctggcccttggctgtgacacaagatcctcctgcagggctaggcggattgttctggatttccttttgtttttccttttagttttccatcttttccctccctggtgctcattggaatctgagtagagtctgggggagggtccccaccttcctgtacctcctccccacagcttgcttttgttgtaccgtctttcaataaaaagaagctgtttggtctaaaaaaaaaaaaaaaaaaaaaaaa

SEQ ID NO: 2237 - DNA, 1782 bp, Homo sapiens
gttttggcgtccgtttgctgcggtaggaacatggcggatcggctcacgcagcttcaggacgctgtgaattcgcttgcagatcagttttgtaatgccattggagtattgcagcaatgtggtcctcctgcctctttcaataatattcagacagcaattaacaaagaccagccagctaaccctacagaagagtatgcccagctttttgcagcactgattgcacgaacagcaaaagacattgatgttttgatagattccttacccagtgaagaatctacagctgctttacaggctgctagcttgtataagctagaagaagaaaaccatgaagctgctacatgtctggaggatgttgtttatcgaggagacatgcttctggagaagatacaaagcgcacttgctgatattgcacagtcacagctgaagacaagaagtggtacccatagccagtctcttccagactcatagcatcagtggataccatgtggctgagaaaagaactgtttgagtgccattaagaattctgcatcagacttagatacaagccttaccaacaattacagaaacattaaacactatgacacattacctttttagctatttttaatagtcttctattttcactcttgataagcttataaaatcatgattgaatcagctttaaagcatcataccatcattttttaactgagtgaaattattaaggcatgtaatacattaatgaacataatataaggaaacatatgtaaaattctgttatgacataatttatgtctccattttgttgtattggccagtacttttacaaatcaaaacatctctcaagccaaaggagaagacagtaagaacagacataagggacattttagtttaggctagtgtcctgcctcttagaggtggcattgtgtaaatctgagctttgagcaagaaagttttggaaattgtgttgcttttaagaaatagagttagtgtggctggataagaaagtcacatttatgcaaatgtttcttctgctagaacctcatacctgttctagttcatctccacgtttattttaccaagagatcctctgtcaagagaatttcctggctgttgtgaaagaatttttctacatcctgaactatttttcctatttcttttcaccttgctttttttcatccttaatttgcttgtcatcacaatgaagtatgttttttgaatcatcaattctttctcattctccatttatctgaaggttcttttgcccttattaacctctcaacttttattgctgtattctagtcagaccagaacatacttccactacatcagttacttggcatcatttcacctcagtttattattgccaaataataatttgtgtcagcattttcaactatggttattcatccaacccttggatctctttgagtctactgataatctccactggaaaggtggaattgaaatgtggtccacattttaactagctatttcctggggctgtatttttcagaatatgctgagctacatttgctgcaatctgttgctattcagagtttaagtttcaggagaaaacaggaacaatagaacactctgcctgttatttttgttgtaatcaagcttttccacagttcttgaaaagtactatgtttcaaatttcaggaacaccagcgttagctgtaaaagttgcagcaatttattggctagtcatagaaaatttttgaacttttaactgtattttaattgatgtttattaaaaacactttgctatcaggaaaaaaaaaaaaaaaaaaaaaaaaaaaa

SEQ ID NO: 2238 - DNA, 5243 bp, Simian virus 40
gcctcggcctctgcataaataaaaaaaattagtcagccatggggcggagaatgggcggaactgggcggagttaggggcgggatgggcggagttaggggcgggactatggttgctgactaattgagatgcatgctttgcatacttctgcctgctggggagcctggggactttccacacctggttgctgactaattgagatgcatgctttgcatacttctgcctgctggggagcctggggactttccacaccctaactgacacacattccacagctggttctttccgcctcagaaggtacctaaccaagttcctctttcagaggttatttcaggccatggtgctgcgccggctgtcacgccaggcctccgttaaggttcgtaggtcatggactgaaagtaaaaaaacagctcaacgcctttttgtgtttgttttagagcttttgctgcaattttgtgaaggggaagatactgttgacgggaaacgcaaaaaaccagaaaggttaactgaaaaaccagaaagttaactggtaagtttagtctttttgtcttttatttcaggtccatgggtgctgctttaacactgttgggggacctaattgctactgtgtctgaagctgctgctgctactggattttcagtagctgaaattgctgctggagaggccgctgctgcaattgaagtgcaacttgcatctgttgctactgttgaaggcctaacaacctctgaggcaattgctgctataggcctcactccacaggcctatgctgtgatatctggggctcctgctgctatagctggatttgcagctttactgcaaactgtgactggtgtgagcgctgttgctcaagtggggtatagattttttagtgactgggatcacaaagtttctactgttggtttatatcaacaaccaggaatggctgtagatttgtataggccagatgattactatgatattttatttcctggagtacaaacctttgttcacagtgttcagtatcttgaccccagacattggggtccaacactttttaatgccatttctcaagctttttggcgtgtaatacaaaatgacattcctaggctcacctcacaggagcttgaaagaagaacccaaagatatttaagggacagtttggcaaggtttttagaggaaactacttggacagtaattaatgctcctgttaattggtataactctttacaagattactactctactttgtctcccattaggcctacaatggtgagacaagtagccaacagggaagggttgcaaatatcatttgggcacacctatgataatattgatgaagcagacagtattcagcaagtaactgagaggtgggaagctcaaagccaaagtcctaatgtgcagtcaggtgaatttattgaaaaatttgaggctcctggtggtgcaaatcaaagaactgctcctcagtggatgttgcctttacttctaggcctgtacggaagtgttacttctgctctaaaagcttatgaagatggccccaacaaaaagaaaaggaagttgtccaggggcagctcccaaaaaaccaaaggaaccagtgcaagtgccaaagctcgtcataaaaggaggaatagaagttctaggagttaaaactggagtagacagcttcactgaggtggagtgctttttaaatcctcaaatgggcaatcctgatgaacatcaaaaaggcttaagtaaaagcttagcagctgaaaaacagtttacagatgactctccagacaaagaacaactgccttgctacagtgtggctagaattcctttgcctaatttaaatgaggacttaacctgtggaaatattttgatgtgggaagctgttactgttaaaactgaggttattggggtaactgctatgttaaacttgcattcagggacacaaaaaactcatgaaaatggtgctggaaaacccattcaagggtcaaattttcatttttttgctgttggtggggaacctttggagctgcagggtgtgttagcaaactacaggaccaaatatcctgctcaaactgtaaccccaaaaaatgctacagttgacagtcagcagatgaacactgaccacaaggctgttttggataaggataatgcttatccagtggagtgctgggttcctgatccaagtaaaaatgaaaacactagatattttggaacctacacaggtggggaaaatgtgcctcctgttttgcacattactaacacagcaaccacagtgcttcttgatgagcagggtgttgggcccttgtgcaaagctgacagcttgtatgtttctgctgttgacatttgtgggctgtttaccaacacttctggaacacagcagtggaagggacttcccagatattttaaaattacccttagaaagcggtctgtgaaaaacccctacccaatttcctttttgttaagtgacctaattaacaggaggacacagagggtggatgggcagcctatgattggaatgtcctctcaagtagaggaggttagggtttatgaggacacagaggagcttcctggggatccagacatgataagatacattgatgagtttggacaaaccacaactagaatgcagtgaaaaaaatgctttatttgtgaaatttgtgatgctattgctttatttgtaaccattataagctgcaataaacaagttaacaacaacaattgcattcattttatgtttcaggttcagggggaggtgtgggaggttttttaaagcaagtaaaacctctacaaatgtggtatggctgattatgatcatgaacagactgtgaggactgaggggcctgaaatgagccttgggactgtgaatcaatgcctgtttcatgccctgagtcttccatgttcttctccccaccatcttcatttttatcagcattttcctggctgtcttcatcatcatcatcactgtttcttagccaatctaaaactccaattcccatagccacattaaacttcattttttgatacactgacaaactaaactctttgtccaatctctctttccactccacaattctgctctgaatactttgagcaaactcagccacaggtctgtaccaaattaacataagaagcaaagcaatgccactttgaattattctcttttctaacaaaaactcactgcgttccaggcaatgctttaaataatctttgggcctaaaatctatttgttttacaaatctggcctgcagtgttttaggcacactgtactcattcatggtgactattccagggggaaatatttgagttcttttatttaggtgtttcttttctaagtttaccttaacactgccatccaaataatcccttaaattgtccaggttattaattccctgacctgaaggcaaatctctggactcccctccagtgccctttacatcctcaaaaactactaaaaactggtcaatagctactcctagctcaaagttcagcctgtccaagggcaaattaacatttaaagctttccccccacataattcaagcaaagcagctgctaatgtagttttaccactatcaattggtcctttaaacagccagtatctttttttaggaatgttgtacaccatgcattttaaaaagtcatacaccactgaatccattttgggcaacaaacagtgtagccaagcaactccagccatccattcttctatgtcagcagagcctgtagaaccaaacattatatccatcctatccaaaagatcattaaatctgtttgttaacatttgttctctagttaattgtaggctatcaacccgctttttagctaaaacagtatcaacagcctgttggcatatggttttttggtttttgctgtcagcaaatatagcagcatttgcataatgcttttcatggtacttatagtggctgggctgttcttttttaatacattttaaacacatttcaaaactgtactgaaattccaagtacatcccaagcaataacaacacatcatcacattttgtttccattgcatactctgttacaagcttccaggacacttgtttagtttcctctgcttcttctggattaaaatcatgctcctttaacccacctggcaaactttcctcaataacagaaaatggatctctagtcaaggcactatacatcaaatattccttattaacccctttacaaattaaaaagctaaaggtacacaatttttgagcatagttattaatagcagacactctatgcctgtgtggagtaagaaaaaacagtatgttatgattataactgttatgcctacttataaaggttacagaatatttttccataattttcttgtatagcagtgcagctttttcctttgtggtgtaaatagcaaagcaagcaagagttctattactaaacacagcatgactcaaaaaacttagcaattctgaaggaaagtccttggggtcttctacctttctcttcttttttggaggagtagaatgttgagagtcagcagtagcctcatcatcactagatggcatttcttctgagcaaaacaggttttcctcattaaaggcattccaccactgctcccattcatcagttccataggttggaatctaaaatacacaaacaattagaatcagtagtttaacacattatacacttaaaaattttatatttaccttagagctttaaatctctgtaggtagtttgtccaattatgtcacaccacagaagtaaggttccttcacaaagatcaagtccaaaccacattctaaagcaatcgaagcagtagcaatcaacccacacaagtggatctttcctgtataattttctattttcatgcttcatcctcagtaagcacagcaagcatatgcagttagcagacattttctttgcacactcaggccattgtttgcagtacattgcatcaacaccaggatttaaggaagaagcaaatacctcagttgcatcccagaagcctccaaagtcaggttgatgagcatattttactccatcttccattttcttgtacagagtattcattttcttcattttttcttcatctcctcctttatcaggatgaaactccttgcatttttttaaatatgcctttctcatcagaggaatattcccccaggcactcctttcaagacctagaaggtccattagctgcaaagattcctctctgtttaaaactttatccatctttgcaaagctttttgcaaaagcctaggcctccaaaaaagcctcctcactacttctggaatagctcagaggccgaggcg

SEQ ID NO: 2239 - DNA, 912 bp, Simian virus 40 large tumor antigen
cctaggcttttgcaaaaagctttgcaaatatggataaagttttaaacagagaggaatctttgcagctaatggaccttctaggtcttgaaaggagtgcctgggggaatattcctctgatgagaaaggcatatttaaaaaaatgcaaggagtttcatcctgataaaggaggagatgaagaaaaaatgaagaaaatgaatactctgtacaagaaaatggaagatggagtaaaatatgctcatcaacctgactttggaggcttctgggatgcaactgaggtatttgcttcttccttaaatcctggtgttgatgcaatgtactgcaaacaatggcctgagtgtgcaaagaaaatgtctactaactgcatatgcttgctgtgcttactgaggatgaagcatgaaaatagaaaattatacaggaaagatccacttgtgtgggttgattgctactgcttcgattgctttagaatgtggtttggacttgatctttgtgaaggaaccttacttctgtggtgtgacataattggacaaactacctacagagatttaaagctataaggtaaatataaaatttttaagtgtataatgtgttaaactactgattctaattgtttgtgtattttagattccaacctatggaactgatgaatgggagcagtggtggaatgcctttaatgaggaaaacctgttttgctcagaagaaatgccatctagtgatgatgaggctactgctgactctcaacattctactcctccaaaaaagaagagaaaggtagaagaccccaaggactttccttcagaattgctaagttttttgagtcatgctgtgtttagtaatagaactcttgcttgctttgctatttacaccacaaaggaaaaagctgcactgctatacaagaaaattatggaaaaataa

SEQ ID NO: 2240 - DNA, 1009 bp, Homo sapiens
ggcgaaaggaagggcgggccctcaggtgacgcagattggccctccagagaaggggcggccccttctcaggtgccgtcacccccaaacctcagcactgccattccaggtccttaaaggggagaccgcgattctaagaagcagccaagcccagggctggcctgaagcccccggacggcagtgcccagcaggcagcgcccagcaccctggctcccacctcccagtggccccaaaggaaaacagctgccatgcacatccccaaaagcctccaggagctggccaacagcgaagccgtgcagtttctgagaaggcccaagaccatcacgcgggtcttcgaaggggtcttctccctgatcgtcttctcctccctgctgaccgacggctaccagaacaagatggagtctccgcagctccactgcattctcaacagcaacagcgtggcctgcagctttgccgtgggagccggcttcctggccttcctcagctgcctggccttcctcgtcctggacacacaggagacccgcattgccggcacccgcttcaagacagccttccagctcctggacttcatcctggctgttctctgggcagttgtctggttcatgggtttctgcttcctggccaaccaatggcagcattcgccgcccaaagagttcctcctggggagcagcagtgcccaggcagccatcgccttcaccttcttctccatccttgtctggatattccaggcctacctggcattccaggacctccgaaatgatgctccagtcccttacaagcgcttcctggatgagggtggcatggtgctgaccaccctccccttgccctctgccaacagccctgtgaacatgcccaccactggccccaacagcctgagttatgctagctctgccctgtccccctgtctgaccgctccaaagtccccccggcttgctatgatgcctgacaactaaatatccttatccaaatcaataaagagagaatcctccctccagaagggtttctaaaaaca

SEQ ID NO: 2241 - DNA, 3244 bp, Homo sapiens
taatagaacacttcacctgaacctaaaatggtgagcgagagtcaccatgaggccctggcagccccgcctgtcaccactgtcgcgactgttctgccaagcaatgccacagagccagccagtcctggagaaggaaaggaagatgcattttctaagctgaaggagaagtttatgaatgagttgcataaaattccattgccaccgtgggccttaattgcaatagccatagtcgcagtccttttagtcctgacctgctgcttttgtatctgtaagaaatgtttgttcaaaaagaaaaacaagaagaagggaaaggaaaaaggagggaagaatgccattaacatgaaagatgtaaaagacttagggaagacgatgaaagatcaggccctcaaggatgatgatgctgaaactggattgacagatggagaagaaaaagaagaacccaaagaagaggagaaactgggaaaacttcagtattcactggattatgatttccaaaataaccagctgctggtagggatcattcaggctgctgaactgcccgccttggacatggggggcacatctgatccttacgtgaaagtgtttctgctacctgataagaagaagaaatttgagacaaaagtccaccgaaaaacccttaatcctgtcttcaatgagcaatttactttcaaggtaccatactcggaattgggtggcaaaaccctagtgatggctgtatatgattttgatcgtttctctaagcatgacatcattggagaatttaaagtccctatgaacacagtggattttggccatgtaactgaggaatggcgtgacctgcaaagtgctgagaaggaagagcaagagaaattgggtgatatctgcttctcccttcgctacgtacctactgctggtaagctgactgttgtcattctggaggcaaagaacctgaagaagatggatgtgggtggcttatccgatccttatgtgaagattcatctgatgcagaatggtaagaggctgaagaagaaaaagacaacaattaaaaagaacacacttaacccctactacaatgagtcattcagctttgaagtaccttttgaacaaatccagaaagtgcaggtggtggtaactgttttggactatgacaagattggcaagaacgatgccatcggcaaagtctttgtgggctacaacagcaccggcgcggagctgcgacactggtcagacatgctggccaaccccaggcgacctattgcccagtggcacaccctgcaggtagaggaggaagttgatgccatgctggccgtcaagaagtaaaggaaagaagaagcctttctgcatttgcccatatagtgctctttagccagtatctgtaaatacctcagtaatatgggtcctttcatttttccagccatgcattcctaacacaattcagtggtacttggaatcctgttttaatttgcacaaatttaaatgtagagagcccctaagtccttcatcataccactgccctccaaatctactcttcttttaagcaatatgatgtgtagatagagcatgaatgaaattatttattgtatcacactgttgtatataccagtatgctaaagatttatttctagtttgtgtatttgtatgttgtaagcgtttcctaatctgtgtatatctagatgtttttaataagatgttctattttaaactatgtaaattgactgagatataggagagctgataatatattatacggtaaatatagtatcgtctgcattccagcaaaaatatcaactcgtaaggcactagtacagttaaactgacatcttaaaggacaacttaaacctgagctttctattgaatcatttgagtaccaagataaacttacaccacatacttggtgggtgaatccaattttgtagaattcctacacaggcaaaatagcatgatctgagcagcagcatccaggctgacctcaaggaagcatagccacaaaacagaatagcacctgtctgtacatatttacaaagctaaaataatggcttcactcttatatttgaggaagcaactgaacaggagtcaatgatttcatattactgcatatagaataacaacaaggtgttccgtgtgtgtgtgtgtgtgtgtgtgtgtgtgtgtgtgtgtgtgtgtgcacatttgtttggggatgggggagaagaagctaaggggagaagtcaacatttatgaaatattgcctgactatttaaaaagaaaaaagtagctctccattatcacctttatacaaaatgtacatcctgtgaattctgttccagatttcacacctacaataattccaaaaggtttgcacattagagtttgtaacaaaatattttattatataaaaccaggttagaaggaatgcaggatatttttaacacaacaatctgtgcttattacacaaaattactttgtggtaaacagacagtattgtaatcccatcaaaagatgaaagaaaaacaaaaacaaaaaccaacaacaattagccatagttctgaatgcacttcaattaagccaaaacagacagctagtgatctttttatatgctctttttacttaagttttaatttgtcctttaaaaaaaggtgaaacaaaccaagaacaagttctagaaaactgaagcaacctcttatgtatactagatgcttgatttaggaggagtttttaaacgttttcaatgttattatgtagtaaatgacactattatgaagctactagtcattccataagagtcttaaaggactgctctgtgtacactgtgactgccgtgtgtgcttagacccgtagtttcctcagtggatagcactcaatttattccgtagtgatattgtaacaatactgccattcccttctactgcactgcccaaggtgtgtgtagcacaaacagttctcattacaaaggaccaattcagaactgaaaagctatgcataggacaaggaagatacatagaatggggtggaacacagcattttgtcaagcactgtgcaatattccatatttttccccactatggtagacaaccatttcgtggaagggcagcctattatcccacactgcatctagccttttgtcccattcacttctgtgatccattttaatttccaggccacaagacagtagtgatgctctgaaatgaaagtttgtcttcacaaatatcaaaacaaaatggaggaaaactaagcattggcctcatgttcagtcttcaggatatcacaccacgtcttttcaaaaactaaa

SEQ ID NO: 2242 - DNA, 5103 bp, Homo sapiens; identical to SEQ ID NO: 1099

SEQ ID NO: 2243 - DNA, 4989 bp, Homo sapiens
agcgcgtcctccgccagccctcgcgtctgctgcccccgccatccagttggtgcggtccatggcgagcgcatcatggcgattgaaggtggagagagaacctgtggagtacatgaacttatctgtattagaaaagtatctccagaggcagttggatttttgtcagctgttggggtgtttattatcttgatgctgctcctttttctctatattaataagaagttctgttttgaaaatgttggcgggtttccagatcttggttcagaatacagtacaaggaagaattcacaagataaaatttataattcctacatggacaaagatgagcatggttcatcctctgaaagtgaagatgaagcgctgggtaaatatcatgaggccttatccagaacacacaattccagactaccactggcagattctagacaaaggaactatgcttgggaaacaaggcagaaatacagtcctctatcggcagagtatgatggatacagtagtgaagcatcaatagatgaaggaaactgcattcagagaatgagaagaacacccccgctggatgaattgcagccaccaccatatcaggatgacagtggttctccccatctgtcatgtacaccctcagaaattggggacagtaaatgtgaattttcccactgcagcaacagtccaagatgctcatataacaagtgcccaagtgaaggaagcacaggtcatgaaatagaaagttttcataataaaggatatgaagaagatgttccaagtgacagcactgcagtcctgagccctgaagatatgtcagctcaaggatcatcttcgcagcttcctaaaccttttgatcctgagccagaagctaaatatggcacactggatgtgacttttgactatgactcacaagaacagaagcttctggtaacagtgacagctgtcacagacatcccaacatataacaggacaggtggcaactcatggcaagtacaccttgttcttctacctataaagaaacagagagcaaaaaccagcatccagagaggaccatgccctgtcttcacagaaacatttaaatttaatcatgttgaatctgagatgattggaaattatgcagttcggtttagactgtatggtgtacatcgcatgaaaaaagaaaagattgtgggggaaaagattttttatttaacaaaattgaatcttcaagggaaaatgtcattgcctgtgatattggaaccttcttacaatcattctggctgtgactcccaaatgagcgtgtcagaaatgtcgtgtagtgaaagtacatcctcatgtcagtctcttgaacatggctcagttccagaaattcttattggcctgctttataatgccacaactggaagactatcagcagaagtgataaaaggcagccacttcaaaaatttggcagcaaacagaccacccaatacatatgttaagttaactctactgaattccatgggtcaagagatgtccaaatgcaagacatccatccgcagagggcagccaaatccagtatataaggaaacttttgtctttcaagtggccctatttcagctttctgatgtgacactcatactgtctgtgtataacaaacgcagcatgaaaagaaaagagatgataggctggatttctttaggtctcaacagctctggagaagaagaactcaatcactggactgaaatgaaagagtcaaaaggacagcaagtatgtagatggcatgcgttgctagagtcatgatgaatagaataagcaagcagttaccatcaaaggcagcatatttccaattccaacattactgtttctaccaagtcccattagaagagctgttctttgaagaatcatattcaaccttctaccaaaatgctttaagttctatggaaagaacgtctcatactgacataaatgaagaaaatatgtgtatctagtagagcttgtttaggaaactgagaaacgtacactatcattgctaaactaacagtcctccagaaatttaataagatgtttttgatttgaagttaattttaatttagcaaaagagccagtcattttatgaaaaatcaaaattataagtgattttaaaaaccagaattttagttgcaatacaattttaatatcaccctacatattatttataaaacatagtttgactggccagtccctggtgtttgtaatgttctttaatatgaaaaagtagttctccaactctatcataagtcatatctaatggtgaagggtttcagtcacattgaaaattgttttatttcaggcatgttccctttgtgcacttaggttcattgtgcctcagttcctctcaaaagcactaaatctaagtgcaaacaagtattcattttcatacaggaatttttttaatatgttatttttttaaaagttcatttttcatttgcctccgctttcgcctgatccaaagagaccaagtcactgtactggtcccttgcaagtcttctagacaggttgtactgtagaactacgtaactttctgttgaaagcacttcctgtattcttgtattccaatgtaggaagctaatagagcaggactttactttcaaatttctttcagtgattgactcttcaaaattgcagtagtgtgaaaatacattttttacaaactgaaaatacagtagataagctgtcgaaaatggaaaacaattcaattttaattttctgctctgagtatttagtaaccaacactgcgtaaagcaggtagcattcaaaataagaaactgttctctctctaaatcttcactcttacttcaatttatatttgtgatatgaagactatccagttctcagtttgaattggaacatcatgttaaaaacagttatgagattccttatgaagtttctagtaacttgtaactagactttatgaaattaacagataaagttcttcaacgtgatgtcatcttgtgcctttcatgtaagttaaatttgctcatacagcttgaacgttgtatttgcaaaattaagccttcgatttttataaatgtaaagattcctcagaacagtgtcgcaagatctttatttcctctgaagtatgtaaaagttgtataatgtgctaactttttaatggcaaggcactttcatttgtttttatatttaggaactctaatcaggaatattataagctgttttctttttaattttgcttcttacctaatatatcattttatgcatatactttatcagagtatgttttatatatattaaaaatagtttcttttttctccttctcatttctagttaaaatagacaaaaacatactatttaccagttactaaaaagcagtatatcattgcttctagtcccaactaagtactatatattattgtaaactagaacttgttattaccataataacaaaacaatgcgtagatattacttcagcttggctgtactgaaaggccttaaaagaaacccaaaaagaccgtgaacttctgtatttttttagtttaaaaaatggcagctctatgcattcatacacatgaattataagaaaaaatacaaatgctatattggatgacatgaggtttgagaatgtgtgttacagggctgcattaaagggaaaaatccatcttttattgttacatcaatgagctttttccaggatttttcaaataaacaagtaagagttagaacctgaatcaaatggcaaaatatctcatttaagtgttttcagcaacagtatgaaaaaagacttgaagaggggatgtagattttactgagaaattggacttaggcatttgaagctataatgaactttttagactttgaaacaactgactgcattgctaacaactgttatcttcctaataaaaagagttatcagtcttatctgtaactgtaacagagcttagtgaaacacattagtaagaccagcttggtgctttcactcttagtgagaaaaagacctaactaattgttatttgttaaatctaccttttttcagactattcccagaattgtgtgtgtgatttgatacatccctagggatttatctggcataagtatcaaatccttcatggcttaaaaattaataaacagttttttaatatttctggaaagaccctacctccaccccagctgccaagtcctcaaagattataaattatctatatgagtgtatgtatctgtatacacacatgcaccattacacatacaacataaatatgtatatgtatattcatttgtaaaggcaaaggtgccctggctttttcagataactgaatagaaaaacatttcatacatttaggattatttttctcctctatgtatttactagatattatatttggtttgggttgctttctgctgctgttctccttcacacacagcaaaatatacatttgtttctgtagattgacacaacttataataattactcccaaaaagttgtctgttcttttagaaaaggattaaataaggctcaggggacccacttcactctactgaatctaatgtacgagacagtactactgcttctttgtgtgcttgaatttgcatgaaagcttaatagcaaaatcttctatctcagtaattatagcaaatagggacctactggtagggagcaggtgttggctcagaaacctgaaaaagacaacccactttcatacagttctattaaaatcccctaagttttctaataaaatgatatagtccaaatatggcaatcgactggcatttatgggagcctctaaacctggaattatggggtttatttttctcccaaatgagctgcaaaagataattattgctgcccagtaaacaaaatgtatgtcaaatcagtaaagaatttgtttagcataatattgccttatctttcagaagctttcttctatattcttgtgtcttcagtacaatccacttttgtttgaaatccatttgcatattatcttactgtgcatttagtgaattctcaataatgttgtatttgctgacaagaataataaattggaccacaattaaaaa

SEQ ID NO: 2244 - DNA, 2584 bp, Homo sapiens
cagttggtgcggtccatggtgagctcatcatggcgattgaaggtggagagagaacctgtggagtacatgaacttacctgttttagaaaagtatctccagaggcagttgggtttttgtcagctgtttgggtgtttattatcctgatgctgcttctttttctctatattaataagcagttctgttttgaaaatgttggagggcttccagatcttggttcagaatacagtacaaggaacaattcacaagataaaatgtgtctgtgactcccaaatgagcgtgtcagaaatgtcttgtagtgaaagtacatccgcatgtcagtctctcgaagacgggtcagttccagaaattctcattagcctgctttataatgccacaaatgggagactatcagcagaagtgataaaaggcagccacttaaaaaattgggcagcaaacagaccacccaatacatatgttaagttaactctacggaaatccacggatcaagagatgtccaaatgcaagatatccatccgcagagggcggccaaatccagtatacaaggaaacttttgttttcaaagtgaccctatttcagctttctcatgtgacactcatgctgtctgtgtataacaaaagcagcatgagaagaaagatgataggctggatttatttaggtctcaacagctctggagaagaactcaatcactggactgaaatgaaagagtcaaaaggacggcaagtacgtagatggcaggcgttgctagagtcacgatgaatacaataagcaaacagttaccatccaatgcagcatatttctaattacaacattactgtttctaccaagtcgccattggaagagctgttctttgaagaatcatattcaaccttttaccaaaatgctttaagttctatggaaagaacatctaatactgagataaatgaagaaaatatgtgtatctgatagagcttgtttgggaaactgagaaacgtacattatcattgttaaactaacagtcctccagaaatttaataagatgtttttgatttgaagttaattttaatttagcaaaagagccggtaattttatgaaaaatcaaaattataagtgattttaaaaaccagagttttagtcgcaatataattttaatatcactctacatattatttataaaacatagtttggccagtccctggtgtttgtaatgttctttaatatgaaaaagtagtcctccaaccctatcgtaagtcatatctaatggcgaagggtttcagtcacattgaaaattgttttatttcagacatgttccttttgtgcacttagtttcattgtgcctcagttcctctctatagcactaaatctaagtgcagacaagcattcgttttcatacaggaatgtttttaatatacaaagtcactgtgctggtcccttgcaagtctttagacaggttgtactgtagaactacgtaactttctgttgaaagcacttcctgtattcttgtatttcaatgtaggaagctagtagagcaagactttactttaaaatttctttcagtgattgactcttcaaaaattgcagtaatgtgaaaatacatttttttttacaaactgaaaacacagcagataagctgtagaaaatgaaaaacgattcaattttaattttctgctctgagtatttagtaaccaacactgcctaaagcaggtagcatccaaaataagaaactattctctctctaaatcttcactcttacttcaatttacatttgtgatataaagactatgcagttctcagtttaaatcggaacatcatgttaaaaacagttctgagattccttacgaagtttccaataacttgtgactagactttatgaaatttacggataaagttcttcaacatgatgttatcttgtgcctttcatgtaagttgaatttgctcatacggcttgaaagttgtatttgcaaaattaagccttcgatttttataaatgcaacgattcctcagaacagtgtcgcaagatctttatttcctccgaagtatgtaaaagttgtatgatgtgctaattttgtaaatggcaagtcactttcatttgtttttatatttagaaactctaattaatcaggaatattataagctgttttctttataattttgcttcttacctaatgtatcattttatgcatatactttattaaatagagtatgttttatatatattaaaaatagtttcttttttctccttctcatttctagttcaaatagacaaaaacatactatttaccagttactaaaaagcagtatatcattgctcctagtcccaaaaaagtactatatattattataaactagaacttgttattaccataataaaaaaagaccgtgaaattctgtattttttcatttaaaaaaagcagctctatgcattcatacacatgaattataagaaaaaatacaaaaggtatattggatgacatgaggtttgagaatgtgttttacagggctgcattaaagggaaaaattcatattttattgttacatcaatgagctttctccaggatttttacaataaacgagtaggaattagaacctgaaaaaaaaaaagagagat

SEQ ID NO: 2245 - DNA, 2422 bp, Homo sapiens
acttcggagccgagttggggcagcggtggagcggggacttcgcgcccccaggggaacgggcgcccctgcgaaaccgtcgccagccacgcgtccttgccgtccgacgccccctcacattggagaccccggatctctcccgcctccttcgggtcgctctccgctgtttcctctgccaccatgaggaacattttcaagaggaaccaggagcctattgtggctcctgccaccaccaccgccacgatgcccattggacccgtggacaactccactgagagtgggggtgctggggagagtcaggaggacatgtttgccaaactgaaggagaagttattcaatgagataaacaagattcccttaccaccctgggcactgatcgccattgctgtggttgctgggctcctgcttctcacctgctgcttctgcatctgcaagaaatgctgctgcaagaagaagaagaacaagaaggagaagggcaaaggcatgaagaatgccatgaacatgaaggacatgaaagggggtcaggatgacgacgacgcagagacaggcctgactgagggggaaggtgaaggggaggaggagaaagagccagagaacctgggcaaactgcagttttccctggactatgattttcaggctaatcagcttactgtgggcgttctgcaggctgctgaactgcctgccctggacatgggaggcacctcagacccttatgtcaaggtcttcctccttcctgacaagaagaagaaatatgagaccaaagtccatcggaagacactgaaccctgccttcaatgaaaccttcaccttcaaggtgccataccaggagcttgggggcaaaactctggtgatggccatctatgactttgaccgcttctccaaacatgacatcattggagaggtaaaggtgcctatgaacacagtggacctcggccagcccattgaggagtggagagacctgcaaggcggggaaaaggaggagccggagaagctgggcgacatctgcacctccctgcgctatgtgcccacggccgggaagctcactgtctgcatcctggaggctaagaacctcaagaagatggacgtgggcggcctttcagacccgtacgtgaagatccacctgatgcagaatggcaagaggctcaagaagaagaagacaaccgtgaagaagaagaccctgaacccatacttcaacgagtccttcagctttgagatccccttcgagcagattcagaaagtccaggtagtggtcaccgtgctggactatgacaagctgggcaagaacgaagccataggcaagatcttcgtgggcagcaatgccacgggcacagagctgcggcactggtccgacatgctggccaacccccggaggcccatcgcccagtggcactcgctcaagcctgaggaggaggtggatgcactcctgggcaagaacaagtagacagcagcggctgggaccccacacctttcacggacactgacaagatccagagctatcaatacctcagttatgcaaccttagaggttttcttttttctttcatttgttgggtggttgtgtccttgtttttccttgtttttctctttttaaagaccaacttccctttgatggctgtgtgaggagagtcccctaagaggtgaaagagaagcctggctctgttcacggtcccaggagctgtccttgctgcatgccctgtcacagttccctcgactctttcaaagcttcacatctgcctcaccccaagcgaggctctctactggcacaaacttgcagcagttcctgttttttgagccttctggaccaacaaaatggcagcacatcctgcttcctgacagggaaggcatcacagtggccaatgatcgtgtgtgtgtgtgtgtgtgtgtgtgtgtgtgtgtgtgtgtgtgtgtgtgtgtgtgtctttgagcatttctcttcattcctggaatgtgtgtgtgtgtgtgtctctttgagcatctctcttcattcctggaatgagccatggacagtaaagttgtgtgggaaaagaaggctctttggggaccctgacatgaagaagtccactaagtgggagatcttctctcatctatggcaaagtctcaggatcctgttcagatatcggggctttcatactcctgttggtggctatttgggaggcagcaagatgtgaagactggatgtgttcagaactaggaccaaacgatgccatcaaatacttcctcctgccagtcatggtttccccagaagtgtagttcctgggacattcatggatatgagctattcactagttgggtcagactaacagggactctcagtcccaaaatctcactcttattgacaataaatatcaaactatgaagaaacagaagtcccattaccagaaagaccaaaattaaactcctggatcttcaccccatccagtgggaaac

SEQ ID NO: 2246 - DNA, 1853 bp, Homo sapiens
tttccgcctacccgagaccaaatacgggcacacacaatacacaccacacacgcgcgcacacgcacacgggcacacacgcgcgcacgggatcctgctccgctccgcggctcccccgccccggagagctccgcgatcagcacccgggacagcgccaccgcccacgtgcagggggtggggtccgggcggggctggcgcctcggcgtctcccgggagtgtcccgtccagccgccgagcagggtgcttgagtgtctctgcagaaaagactccaggaccccgccaccatgttcccggagcccccaaccccggggcctccatcgcccgacacgcctcccgactccagtcgcatcagccacggcccagtgcccccctgggccctggccaccatcgtgctggtctcaggcctcctcatcttcagctgctgtttctgtctctaccggaagagctgtcggaggcggacaggcaagaagagccaggcccaagcccaggtccaccttcaggaagtgaaggggctgggccagagttacatagacaaggtgcagccagaagtagaggagctggagccagcaccatccgggccagggcagcaggtggcagacaagcatgagctaggacgactgcagtactccctggattatgacttccagagtggccagctgctggtgggcattctgcaagcaatgggattggcagccttggatcttggtggctcctcggacccctatgtgcgggtctacctgctgccggacaaacggaggcggtacgagaccaaggtgcatcggcagacgctgaaccctcactttggggagaccttcgccttcaaggtcccctacgtggagctggggggcagggtgctggtcatggcggtgtacgacttcgaccgcttctctcgcaatgacgccatcggggaggtgcgggtccctatgagctccgtggacctggggcggccagtgcaggcctggcgggagctgcaggcggctccgcgggaggagcaggagaagcttggggacatctgcttctccctccgctatgtccccacggccgggaagctcaccgtcatcgtcctggaggctaaaaacctgaagaagatggacgtaggaggactgtcagatccatacgtcaaggtccacctgctgcagggcggcaaaaaggtgcggaagaagaaaaccaccatcaagaagaacactctgaacccctattacaacgaagctttcagcttcgaggtgccctgtgaccaagtccagaaggtgcaggtggagctgaccgtgctggactacgacaagctgggcaagaacgaggccatcgggagggtggccgtgggggcggccgccggcggggctggcctgcggcactgggcggacatgctggccaacccgcggcggcccattgcccagtggcactcgctgcggcccccggaccgagtgaggctgctgcctgcgccctgactcccaccccaagcccccggccaagcctggactctagcccctgaccccagactcccgagaccggccaaagccaagccagccccacccttaagcttcctctgacggttaccctccccccaccttccaccccaaccatctgaaccattcctgtcttctcacccccaacgatgccaatcacgacaactttccagcacactcccccgaccctcgcggacacacccagatgccccagggaccccgggaagggaaggcagcctggtttctcctgcccccgggtcctgccccctgctttgacaatcagccatcctcgtctgctctcctctctcttccaacacagcccatccctgcactgctcctggggccaaataaatattcagcagctcaaaaaaaaaaaaaaaaaaaaaaaaaaaa

SEQ ID NO: 2247 - DNA, 445 bp, Homo sapiens
aaccgccatcgcgtcttggttatgctgccagcggaattcggcttcagcagcggggcaggttggtggaaggcttcagtggatggcgtcagttacgttcgaccggctggtctgtgcttaagttgttccagcagattcggtgcaatggtcagacgatcgcaaccggccaatgccaggatctgctctaccttgcggaatggctcccatgatcaccgtctgataacggtgctgtttgtagtattcgtaaatgttgcgtactggatttcacacccggatcttgggtcggcatcatagtcagcggcaggctgtttggcctgataccagtcataggatgcggccgacgaacgggagagatcaaggaggacgccggctttcggccaaggcacgagctggggcgaaaagaggaacagcagtgttcaggttgggatttatgcttctttttttccag

SEQ ID NO: 2248 - DNA, 1134 bp, Homo sapiens
cacgcaagcgaaaggagaggaggcggctaattaaatattgagcagaaagtcgcgtggggagaatgtcacgtgggtctggaggctcaaggaggctgggataaataccgcaaggcactgagcaggcgaaagagcgcgctcggacctccttcccggcggcagctaccgagagtgcggagcgaccagcgtgcgctcggaggaaccagagaaactcagcaccccgcgggactgtccgtcgcaaaatccaacatgaaaatcctcgtggccttggcagtcttttttcttgtctccactcagctgtttgcagaagaaataggagccaatgatgatctgaattactggtccgactggtacgacagcgaccagatcaaggaggaactgccggagccctttgagcatcttctgcagagaatcgcccggagacccaagcctcagcagttctttggattaatgggcaaacgggatgctgattcctcaattgaaaaacaagtggccctgttaaaggctctttatggacatggccagatctctcacaaaatggcttatgaaaggagtgcaatgcagaattatgaaagaagacgttaataaactacctaacattatttattcagcttcatttgtgtcaatgggcaatgacaggtaaattaagacatgcactatgaggaataattatttatttaataacaattgtttggggttgaaaattcaaaaagtgtttatttttcatattgtgccaatatgtattgtaaacatgtgttttaattccaatatgatgactcccttaaaatagaaataagtggttatttctcaacaaagcacagtgttaaatgaaattgtaaaacctgtcaatgatacagtccctaaagaaaaaaaatcattgctttgaagcagttgtgtcagctactgcggaaaaggaaggaaactcctgacagtcttgtgcttttcctatttgttttcatggtgaaaatgtactgagattttggtattacactgtatttgtatctctgaagcatgtttcatgttttgtgactatatagagatgtttttaaaagtttcaatgtgattctaatgtcttcatttcattgtatgatgtgttgtgatagctaacattttaaataaaagaaaaaatatcttgaa

SEQ ID NO: 2249 - DNA, 1035 bp, Homo sapiens
tcgaccagctccactccagcaccgcggcggaggagagcgaggacgcccaggcaagtgcgcacctgcggagcatcaccgggtccgaccgcaaaatccaacatgaaaatcctcgtggcggtggcggtcttttttctcgtttccactcaactgtttgcagaggaaatcggtgccaacgatgatctaaattattggtccgactggtccgacagtgaccaaatcaaggaggcaatgcccgagccctttgagcatcttcttcagagaatcgcccgaagacccaagcctcagcagttctttggattaatgggcaaacgggatgctgattcctcaattgaaaaacaagtggccctgttaaaggctctttatgggcatggtcagatctctcacaaaaggcataaaacagattcctttgttggactaatgggcaaaagagctttaaattctgtggcttatgaaagaagcgcaatgcagaactacgaaagaaggcgtaaataaaccctgtaacgcactatctattcatctccatctgtgtccgcgagcagtgagcggtaaaataaaaatgtgcgctatgaggaatgattatttatttaatatcaaatgttgttatgagtgaaaaactcaaaaaagtgtttattttttcatattgtgccaataagcattgtaattctaatgtggtgacctcctcagacagaagtagaaattagttgtaacttcagcaaagcacagtgttgatggagttgtacaagtttgccagcgatgcaagtctccaaagacagaaaggctgctgtgaggcagtgcaggcggctgctgctggaggcagagaaactcctgtgtgtcttgcgcttcccttggttgcttttatcctaatgatgtactgagagtttggtatctgactctatttgtatcctagcagcatgtttcctgtgttgtgactatatagagatgtttttaaaagtttcaatgtacttctctggtcttcagtcattgtatgatgtgttgtgatagctaccattttaaataaaagaatgtatcttcagg

SEQ ID NO: 2250 - DNA, 1188 bp, Homo sapiens
cacgcaagcgaaaggagaggaggcggctaattaaatattgagcagaaagtcgcgtggggagaatgtcacgtgggtctggaggctcaaggaggctgggataaataccgcaaggcactgagcaggcgaaagagcgcgctcggacctccttcccggcggcagctaccgagagtgcggagcgaccagcgtgcgctcggaggaaccagagaaactcagcaccccgcgggactgtccgtcgcaaaatccaacatgaaaatcctcgtggccttggcagtcttttttcttgtctccactcagctgtttgcagaagaaataggagccaatgatgatctgaattactggtccgactggtacgacagcgaccagatcaaggaggaactgccggagccctttgagcatcttctgcagagaatcgcccggagacccaagcctcagcagttctttggattaatgggcaaacgggatgctgattcctcaattgaaaaacaagtggccctgttaaaggctctttatggacatggccagatctctcacaaaagacataaaacagattcctttgttggactaatgggcaaaagagctttaaattctgtggcttatgaaaggagtgcaatgcagaattatgaaagaagacgttaataaactacctaacattatttattcagcttcatttgtgtcaatgggcaatgacaggtaaattaagacatgcactatgaggaataattatttatttaataacaattgtttggggttgaaaattcaaaaagtgtttatttttcatattgtgccaatatgtattgtaaacatgtgttttaattccaatatgatgactcccttaaaatagaaataagtggttatttctcaacaaagcacagtgttaaatgaaattgtaaaacctgtcaatgatacagtccctaaagaaaaaaaatcattgctttgaagcagttgtgtcagctactgcggaaaaggaaggaaactcctgacagtcttgtgcttttcctatttgttttcatggtgaaaatgtactgagattttggtattacactgtatttgtatctctgaagcatgtttcatgttttgtgactatatagagatgtttttaaaagtttcaatgtgattctaatgtcttcatttcattgtatgatgtgttgtgatagctaacattttaaataaaagaaaaaatatcttgaa

SEQ ID NO: 2251 - DNA, 577 bp, Homo sapiens
gtgtaaccagctgggagccagccggcaggacgctgtgagttggcgtgctagtgggatggcagatgaggaagaagaccccacgtttgaggaagaaaatgaagaaattggaggaggtgcagaaggtggacagggtaaaagaaagagacttttttctaaagaattgcgatgtatgatgtatggctttggggatgaccagaatccttatactgagtcagtggatattcttgaagatcttgtcatagagtttatcactgaaatgactcacaaggcaatgtcaattggaagacaaggtcgagtacaagttgaagatatcgtcttcttgattcgaaaggacccaaggaagtttgccagggttaaagacttgcttactatgaatgaagaattgaaacgagctagaaaagcatttgatgaagcaaattatggatcttgacactttttgtagtttccgaaaattaccatctggggaaaccatatataataattgtatattttctaaagtaagattctgatatctagccatgtaaatgaaagatggagaaacacaaagttttcagcctttatttttatgcctttgatt

SEQ ID NO: 2252 - DNA, 2153 bp, Homo sapiens
agtacagctccggccgccgcgccgcctggctttcgtattcgttgttctcggcgggctgtggggcctccgcgccgcggccgttagtcatgtcggattctggaagttacggtcagtctgggggtgagcagcaaagttattctacctatggaaatccaggcagccaaggctatggacaagcatcacaaagctattctggctatgggcaaacgactgattcctcttatggacagaactacagcggttactccagttatggacaaagtcagtcaggttattcacagtcctatggtggttatgagaatcaaaagcagagctcatatagccagcaaccatataataaccagggacagcagcaaaacatggaatcatcaggaagccaaggtggaagagcaccttcctatgaccagccagactatggtcaacaagattcatatgaccagcagtcaggctatgatcaacatcaaggctcatatgatgagcagtcaaattatgatcagcagcatgattcctatagtcaaaaccagcagtcctatcattcacaaagggaaaactacagccaccacacacaagatgaccgtcgtgatgtgagtaggtatggagaagataatagaggatatggcgggtcacagggaggaggtagagggcgtgggggatatgacaaggatggaagaggtcctatgacaggatcaagtggtggtgaccgcggtggcttcaaaaattttggtggtcacagggattatggacccagaacagatgctgattcagaatctgataattcagataacaacacaatctttgtgcaaggacttggggagggtgtgtctacagatcaagttggggagttctttaaacaaataggaattatcaagacaaataagaagaccggaaaaccaatgataaatctttatacagacaaggacacaggaaagccaaagggggaggcaacagtgtcatttgatgaccctccttcagctaaggcagccattgactggtttgatggaaaagaattccatggcaacatcattaaagtgtcctttgccactagaagacctgaattcatgagaggaggtggaagtggaggtgggcggcgaggccgtggaggatatagaggtcgtggaggctttcaagggagaggtggagaccccaaaagtggggattgggtttgccctaatccgtcatgcggaaatatgaactttgctcgaaggaattcctgcaatcagtgcaatgagcctagaccagaggactctcgtccctcaggaggagatttccgggggagaggctacggtggagagaggggctacagaggtcgtgggggcagaggtggagaccgaggcggctatggtggagacagaagtgggggtggctatggtggagacagaagcagcggtggtggctacagcggagatagaagtgggggcggctatggtggagacagaagtgggggtggctatggtggggacagaggcggcggctatggtggggacagaggaggcggctatggaggagaccgaggaggtggctatggaggagatcgaggtggctatggaggagaccgaggtggaggctatggtggagaccgaggaggctatggaggagatcgaggaggttacggaggagatcgaggaggttatggaggagatcgaggaggctatggaggagacagaagccgggggggctatggaggagaccgtggtggtggcagtggctacggtggagaccgaagtggaggctatggaggagacaggagtggtggcggctatggaggagaccgaggtgggggctacggaggagaccgaggtggctatggaggcaaaatgggaggaagaaacgactacagaaatgatcagcgcaaccgaccatactgatgactgttttgaatgttcctttgtctctgacatgatccatagtgaaattgccagagttttgcctgctgctttcctcgtggcctcttcttgggtagtgaaattaagtgacatttggatttttatttgggtgggagggctgggacagtttttcttctagaaatgtctgttgagatttccccctttagtttccaaccttctccccaacccttggagctaaatgcgttgtaaaatattgccaaaatgaaaagtgttttgtaatactgcaataaaggctgcttgtttttgtgg

SEQ ID NO: 2253 - DNA, 4647 bp, Homo sapiens
atggcggcgggctcggatctgctggacgaggtcttcttcaacagcgaggtggacgagaaagtggtgagcgacctggtgggctcgctggagtcgcagctggcggccagcgcggcccaccaccaccacctcgcgccgcgcacgcccgaggtgcgggccgcggccgccggcgcgctcgggaaccatgttgtgagcggcagcccggccggagccgcgggcgcagggccggccgcccccgccgagggcgcgcccggagcggcgccggagccgccccccgcaggtagagcgcggccggggggcggggggccgcagcgcccgggccccccctcaccgcgccgcccccttgtccccgcagggcccgcgccgcccgccgcgaagctgaggccgccgcccgagggcagcgcggggtcctgcgccccggtgcccgccgccgccgccgtcgccgcggggcccgagcccgcccccgccggccccgccaagcccgccggccccgccgcgctggccgcccgcgccggccccggccccgggcccggccccggccccggccccggccctggccctggcaagcccgccggccccggcgccgcgcaaactttgaatgggagcgccgcgctgctgaactcgcaccacgccgccgcacctgctgtcagcctggtcaacaacgggcccgccgcgctgctgccgctgcccaagcccgccgcccccggcactgtcatccagacgccccccttcgtgggcgccgccgcgccccccgcgcccgccgcgccctcgccccccgccgcccccgcgcccgccgcccccgccgccgccccgcccccgccaccccccgcgcccgccactctggcccggccgcccggccaccccgccggacccccgaccgccgcgcccgccgtgccgccccccgccgccgcccagaacgggggcagcgccggggcagcccccgcccccgccccggccgccgggggccccgcgggggtcagcggccaacccgggcccggcgcggcggctgcggcgccggcgccgggggtcaaggccgagtcgcccaagagggtggtgcaggcggcgcccccggcggcgcagaccctggcggccagcggcccggccagcacggcggccagcatggtcatcgggccaactatgcaaggggcgctgcccagcccggccgccgtcccgccgcccgcccccgggacccccaccgggctgcccaaaggcgcggccggcgcagtgacccagagcctgtcccggacgcccacggccaccaccagcgggattcgggccaccctgacgcccaccgtgctggccccccgcttgccgcagccgcctcagaacccgaccaacatccagaacttccagctgcccccaggaatggtcctcgtccgaagtgagaatgggcagttgttaatgattcctcagcaggccttggcccagatgcaggcgcaggcccatgcccagcctcagaccaccatggcgcctcgccctgccacccccacaagtgcccctcccgtccagatctccaccgtacaggcacctggaacacctatcattgcacggcaggtgaccccaactaccataattaagcaagtgtctcaggcccagacaacggtgcagcccagtgcaaccctgcagcgctcgcccggcgtccagcctcagctcgttctgggtggcgctgcccagacggcttcacttgggacggcgacggctgttcagacggggactcctcagcgcacggtaccaggggcgaccaccacttcctcagctgccacggaaactatggaaaacgtgaagaaatgtaaaaatttcctatctacgttaataaaactggcttcatctggcaagcagtctacagagacagcagctaatgtgaaagagctcgtgcagaatttactggatggaaaaatagaagcagaagatttcacaagcaggttataccgagaacttaattcttcacctcaaccttaccttgtgcctttcctgaagaggagcttacccgccttgagacagctgacccccgactccgcggccttcatccagcagagccagcagcagccgccaccgcccacctcgcaggccaccactgcgctcacggccgtggtgctgagtagctcggtccagcgcacggccgggaagacggcggccaccgtgaccagtgccctccagccccctgtgctcagcctcacgcagcccacgcaggtcggcgtcggcaagcaggggcaacccacaccgctggtcatccagcagcctccgaagccaggagccctgatccggcccccgcaggtgacgttgacgcagacacccatggtcgccctgcggcagcctcacaaccggatcatgctcaccacgcctcagcagatccagctgaacccactgcagccagtccctgtggtgaaacccgccgtgttacctggaaccaaagccctttctgctgtctcggcacaagcagctgctgcacagaaaaataaactcaaggagcctgggggaggttcgtttcgggacgatgatgacattaatgatgttgcatcgatggctggagtaaacttgtcagaagaaagtgcaagaatattagccacgaactctgaattggtgggcacgctaacgcggtcctgtaaagatgaaaccttcctcctccaagcgcctttgcagagaagaatattagaaataggtaaaaaacatggtataacggaattacatccagatgtagtaagttatgtatcacatgccacgcaacaaaggctacagaatcttgtagagaaaatatcagaaacagctcagcagaagaacttttcttacaaggatgacgacagatatgagcaggcgagtgacgtccgggcacagctcaagttttttgaacagcttgatcaaatcgaaaagcagaggaaggatgagcaggagcgggagatcctgatgagggcagcaaagtctcggtcaagacaagaagatccagaacagttaaggctgaaacagaaggcaaaggagatgcagcaacaggaactggcacaaatgagacagcgggacgccaacctcacagcactagcagcgatcgggcccaggaaaaagaggaaagtggactgtccggggccgggctcaggagcagaggggtcgggccccggctcagtggtcccaggcagctcgggtgtcggaacccccagacagttcacgcgacaaagaatcacgcgggtcaacctcagggacctcatattttgtttagaaaatgaacgtgagacaagccattcactgctgctctacaaagcattccttaagtgacacaggaggacgcctggggactttttatatatttgcagattacgcctttttgtaacgagcaaatgggatattgtttaaaaaacagccacctctttacaatggaacagttttatattcctgtttctaaatcagctcttcagtgtgaaagaaaacacgtttctgtaacagagagaacacaaaggcctgtggatactcttaaaggacaattaaatcttaactcatcttgattgagtggccttcctgccaaacaagccatatataaagactgatggaatcgttagcaaataattagctgccctctgtcaactcatagcagtttctgcattatttgtgcattttggtttagttctacctaacttactatgtaggtgtatgtctacagccgatgacctcatttcgtttattttatttttgtaatagtcagttggcaaagcaaactgattttttagactatttatcttccttcccttcccctcccaccccgctctcctctctgccccctgccctcccctcccctcccttcccctccactccgctgagaatcctggaggaatacacaattcatcgttgcacccccacctcagagtgtaatcgcatttctgcttggtagaggccgagcccagcaaaggtggctccttctgaatgtgtggtcagcatctgtacaaatgcattttatttgctatagtttgtaaagctgtaaagttaaaagagatgaaaaccttttcagcataaatatattttacttgcactgtgttttttagctaaaagtgaaaacctagattaaataaaatcaaagttgagaagaatcatcaaaagactgtttctcggtgtgaatcaagtgttgaaaaatggttggtgtattttgtcagtaattgtacataacttttggcacatgacatagaaatggctatgtaaactataattattttgctaagagactgtatgcaagccttgggccgactttacagacgtccagagcaaagccccttctttgtacctatttttttattacaaatatactaattggttctttctattttcagaggttattgtatgaaattgtctattgatagtacttttatgactgtaaatactctggctttctccgtgtgaattctcacattagactttaattcgagcgcgtgtgaactgaacgctgatcagtattttttatcaacacctgagaactgttacaccttttattttgtcttttaggaaatccctgtctttccattttttcatgtaaattttgcacagttacttgttcatatgtaaatattttactttcagaaatgaagtttttaattgctattgttttatataggattgaaagaaaattaactcctttattaaaaacaaatttatctgtaaaaaaaaaaaaaaaaaaaa

SEQ ID NO: 2254 - DNA, 2383 bp, Homo sapiens
gcggggccaagatggcgccgagcgccgggtgagcagcgtctcggctgccgctagagttttcctgctccccgcgctcgggtggcgggggcgggtctgagtggtaccccggaggagaccctttgaaggtcccttgtggggactggaaagaggacgggtctccgtctctccaccgggggcttcatccttccagggaggagaagagggactccagaatggctgaggagaagaagctgaagcttagcaacactgtgctgccctcggagtccatgaaggtggtggctgaatccatgggcatcgcccagattcaggaggagacctgccagctgctaacggatgaggtcagctaccgcatcaaagagatcgcacaggatgccttgaagttcatgcacatggggaagcggcagaagctcaccaccagtgacattgactacgccttgaagctaaagaatgtcgagccactctatggcttccacgcccaggagttcattcctttccgcttcgcctctggtgggggccgggagctttacttctatgaggagaaggaggttgatctgagcgacatcatcaatacccctctgccccgggtgcccctggacgtctgcctcaaagctcattggctgagcatcgagggctgccagccagctatccccgagaacccgcccccagctcccaaagagcaacagaaggctgaagccacagaacccctgaagtcagccaagccaggccaggaggaagacggacccctgaagggcaaaggtcaaggggccaccacagccgacggcaaagggaaagagaagaaggcgccgcccttgctggagggggcccccttgcgactgaagccccggagcatccacgagttgtctgtggagcagcagctctactacaaggagatcaccgaggcctgcgtgggctcctgcgaggccaagagggcggaagccctgcaaagcattgccacggaccctggactgtatcagatgctgccacggttcagtacctttatctcggagggggtccgtgtgaacgtggttcagaacaacctggccctactcatctacctgatgcgtatggtgaaagcgctgatggacaaccccacgctctatctagaaaaatacgtccatgagctgattccagctgtgatgacctgcatcgtgagcagacagttgtgcctgcgaccagatgtggacaatcactgggcactccgagactttgctgcccgcctggtggcccagatctgcaagcattttagcacaaccactaacaacatccagtcccggatcaccaagaccttcaccaagagctgggtggacgagaagacgccctggacgactcgttatggctccatcgcaggcttggctgagctgggacacgatgttatcaagactctgattctgccccggctgcagcaggaaggggagcggatccgcagtgtgctggacggccctgtgctgagcaacattgaccggattggagcagaccatgtgcagagcctcctgctgaaacactgtgctcctgttctggcaaagctgcgcccaccgcctgacaatcaggacgcctatcgggcagaattcgggtcccttgggcccctcctctgctcccaggtggtcaaggctcgggcccaggctgctctgcaggctcagcagccccggcccacgctgaccctctcgcaggccccacagcctggccctcgcacccctggcttgctgaaggttcctggctccatcgcacttcctgtccagacactggtgtctgcacgagcggctgccccaccacagccttcccctcctccaaccaagtttattgtaatgtcatcgtcctccagcgccccatccacccagcaggtcctgtccctcagcacctcggcccccggctcaggttccaccaccacttcgcccgtcaccaccaccgtccccagcgtgcagcccatcgtcaagttggtctccaccgccaccaccgcaccccccagcactgctccctctggtcctgggagtgtccagaagtacatcgtggtctcacttcccccaacaggggagggcaaaggaggccccacctcccatccttctccagttcctcccccggcatcgtccccgtccccactcagcggcagtgccctttgtggggggaagcaggaggctggggacagtccccctccagctccagggactccaaaagccaatggctcccagcccaactccggctcccctcagcctgctccgtgatgctccacctgccagcccccggattcccacacatgcagacatgtacacacgtgcacgtacacacatgcatgctcgctaagcggaaggaagttgtagattgcttccttcatgtcactttctttttagatattgtacagccagtttctcagaataaaagtttggtttgt

SEQ ID NO: 2255 - DNA, 2707 bp, Homo sapiens
gcggggccaagatggcgccgagcgccgggtgagcagcgtctcggctgccgctagagttttcctgctccccgcgctcgggtggcgggggcgggtctgagtggtaccccggaggagaccctttgaaggtcccttgtggggactggaaagaggacggttggttgtgtgtctgtgctcgtggggaccccgtgtgtgtgcctgcattggagagatgttgcaggagatggggtgggctctctgaacctcctttcgcgctgcccggggatcttcgacctgcttctctgctgggatctcgcttaagttaacccttccctgggacgccttcctgccgcctccactgatctgaggagatcctgtgactgtagcgtgttttatgagcctttactggcagagggtaccgccgggtattgaaggattcgtaggagttcgccagggaagtgggacacgaccccctcttgtaaacccggcgccaggcacagaggtctccgtctctccaccgggggcttcatccttccagggaggagaagagggactccagaatggctgaggagaagaagctgaagcttagcaacactgtgctgccctcggagtccatgaaggtggtggctgaatccatgggcatcgcccagattcaggaggagacctgccagctgctaacggatgaggatgccttgaagttcatgcacatggggaagcggcagaagctcaccaccagtgacattgactacgccttgaagctaaagaatgtcgagccactctatggcttccacgcccaggagttcattcctttccgcttcgcctctggtgggggccgggagctttacttctatgaggagaaggaggttgatctgagcgacatcatcaatacccctctgccccgggtgcccctggacgtctgcctcaaagctcattggctgagcatcgagggctgccagccagctatccccgagaacccgcccccagctcccaaagagcaacagaaggctgaagccacagaacccctgaagtcagccaagccaggccaggaggaagacggacccctgaagggcaaaggtcaaggggccaccacagccgacggcaaagggaaagagaagaaggcgccgcccttgctggagggggcccccttgcgactgaagccccggagcatccacgagttgtctgtggagcagcagctctactacaaggagatcaccgaggcctgcgtgggctcctgcgaggccaagagggcggaagccctgcaaagcattgccacggaccctggactgtatcagatgctgccacggttcagtacctttatctcggagggggtccgtgtgaacgtggttcagaacaacctggccctactcatctacctgatgcgtatggtgaaagcgctgatggacaaccccacgctctatctagaaaaatacgtccatgagctgattccagctgtgatgacctgcatcgtgagcagacagttgtgcctgcgaccagatgtggacaatcactgggcactccgagactttgctgcccgcctggtggcccagatctgcaagcattttagcacaaccactaacaacatccagtcccggatcaccaagaccttcaccaagagctgggtggacgagaagacgccctggacgactcgttatggctccatcgcaggcttggctgagctgggacacgatgttatcaagactctgattctgccccggctgcagcaggaaggggagcggatccgcagtgtgctggacggccctgtgctgagcaacattgaccggattggagcagaccatgtgcagagcctcctgctgaaacactgtgctcctgttctggcaaagctgcgcccaccgcctgacaatcaggacgcctatcgggcagaattcgggtcccttgggcccctcctctgctcccaggtggtcaaggctcgggcccaggctgctctgcaggctcagcaggtcaacaggaccactctgaccatcacgcagccccggcccacgctgaccctctcgcaggccccacagcctggccctcgcacccctggcttgctgaaggttcctggctccatcgcacttcctgtccagacactggtgtctgcacgagcggctgccccaccacagccttcccctcctccaaccaagtttattgtaatgtcatcgtcctccagcgccccatccacccagcaggtcctgtccctcagcacctcggcccccggctcaggttccaccaccacttcgcccgtcaccaccaccgtccccagcgtgcagcccatcgtcaagttggtctccaccgccaccaccgcaccccccagcactgctccctctggtcctgggagtgtccagaagtacatcgtggtctcacttcccccaacaggggagggcaaaggaggccccacctcccatccttctccagttcctcccccggcatcgtccccgtccccactcagcggcagtgccctttgtggggggaagcaggaggctggggacagtccccctccagctccagggactccaaaagccaatggctcccagcccaactccggctcccctcagcctgctccgtgatgctccacctgccagcccccggattcccacacatgcagacatgtacacacgtgcacgtacacacatgcatgctcgctaagcggaaggaagttgtagattgcttccttcatgtcactttctttttagatattgtacagccagtttctcagaataaaagtttggtttgt

SEQ ID NO: 2256 - DNA, 2441 bp, Homo sapiens
gcggggccaagatggcgccgagcgccgggtgagcagcgtctcggctgccgctagagttttcctgctccccgcgctcgggtggcgggggcgggtctgagtggtaccccggaggagaccctttgaaggtcccttgtggggactggaaagaggacgggtctccgtctctccaccgggggcttcatccttccagggaggagaagagggactccagaatggctgaggagaagaagctgaagcttagcaacactgtgctgccctcggagtccatgaaggtggtggctgaatccatgggcatcgcccagattcaggaggagacctgccagctgctaacggatgaggtcagctaccgcatcaaagagatcgcacaggatgccttgaagttcatgcacatggggaagcggcagaagctcaccaccagtgacattgactacgccttgaagctaaagaatgtcgagccactctatggcttccacgcccaggagttcattcctttccgcttcgcctctggtgggggccgggagctttacttctatgaggagaaggaggttgatctgagcgacatcatcaatacccctctgccccgggtgcccctggacgtctgcctcaaagctcattggctgagcatcgagggctgccagccagctatccccgagaacccgcccccagctcccaaagagcaacagaaggctgaagccacagaacccctgaagtcagccaagccaggccaggaggaagacggacccctgaagggcaaaggtcaaggggccaccacagccgacggcaaagggaaagagaagaaggcgccgcccttgctggagggggcccccttgcgactgaagccccggagcatccacgagttgtctgtggagcagcagctctactacaaggagatcaccgaggcctgcgtgggctcctgcgaggccaagagggcggaagccctgcaaagcattgccacggaccctggactgtatcagatgctgccacggttcagtacctttatctcggagggggtccgtgtgaacgtggttcagaacaacctggccctactcatctacctgatgcgtatggtgaaagcgctgatggacaaccccacgctctatctagaaaaatacgtccatgagctgattccagctgtgatgacctgcatcgtgagcagacagttgtgcctgcgaccagatgtggacaatcactgggcactccgagactttgctgcccgcctggtggcccagatctgcaagcattttagcacaaccactaacaacatccagtcccggatcaccaagaccttcaccaagagctgggtggacgagaagacgccctggacgactcgttatggctccatcgcaggcttggctgagctgggacacgatgttatcaagactctgattctgccccggctgcagcaggaaggggagcggatccgcagtgtgctggacggccctgtgctgagcaacattgaccggattggagcagaccatgtgcagagcctcctgctgaaacactgtgctcctgttctggcaaagctgcgcccaccgcctgacaatcaggacgcctatcgggcagaattcgggtcccttgggcccctcctctgctcccaggtggtcaaggctcgggcccaggctgctctgcaggctcagcaggtcaacaggaccactctgaccatcacgcagccccggcccacgctgaccctctcgcaggccccacagcctggccctcgcacccctggcttgctgaaggttcctggctccatcgcacttcctgtccagacactggtgtctgcacgagcggctgccccaccacagccttcccctcctccaaccaagtttattgtaatgtcatcgtcctccagcgccccatccacccagcaggtcctgtccctcagcacctcggcccccggctcaggttccaccaccacttcgcccgtcaccaccaccgtccccagcgtgcagcccatcgtcaagttggtctccaccgccaccaccgcaccccccagcactgctccctctggtcctgggagtgtccagaagtacatcgtggtctcacttcccccaacaggggagggcaaaggaggccccacctcccatccttctccagttcctcccccggcatcgtccccgtccccactcagcggcagtgccctttgtggggggaagcaggaggctggggacagtccccctccagctccagggactccaaaagccaatggctcccagcccaactccggctcccctcagcctgctccgtgatgctccacctgccagcccccggattcccacacatgcagacatgtacacacgtgcacgtacacacatgcatgctcgctaagcggaaggaagttgtagattgcttccttcatgtcactttctttttagatattgtacagccagtttctcagaataaaagtttggtttgtaagttctgaaaaaaaaaaaaaaaaaaaa

SEQ ID NO: 2257 - DNA, 2737 bp, Homo sapiens
gcggggccaagatggcgccgagcgccgggtgagcagcgtctcggctgccgctagagttttcctgctccccgcgctcgggtggcgggggcgggtctgagtggtaccccggaggagaccctttgaaggtcccttgtggggactggaaagaggacggttggttgtgtgtctgtgctcgtggggaccccgtgtgtgtgcctgcattggagagatgttgcaggagatggggtgggctctctgaacctcctttcgcgctgcccggggatcttcgacctgcttctctgctgggatctcgcttaagttaacccttccctgggacgccttcctgccgcctccactgatctgaggagatcctgtgactgtagcgtgttttatgagcctttactggcagagggtaccgccgggtattgaaggattcgtaggagttcgccagggaagtgggacacgaccccctcttgtaaacccggcgccaggcacagaggtctccgtctctccaccgggggcttcatccttccagggaggagaagagggactccagaatggctgaggagaagaagctgaagcttagcaacactgtgctgccctcggagtccatgaaggtggtggctgaatccatgggcatcgcccagattcaggaggagacctgccagctgctaacggatgaggtcagctaccgcatcaaagagatcgcacaggatgccttgaagttcatgcacatggggaagcggcagaagctcaccaccagtgacattgactacgccttgaagctaaagaatgtcgagccactctatggcttccacgcccaggagttcattcctttccgcttcgcctctggtgggggccgggagctttacttctatgaggagaaggaggttgatctgagcgacatcatcaatacccctctgccccgggtgcccctggacgtctgcctcaaagctcattggctgagcatcgagggctgccagccagctatccccgagaacccgcccccagctcccaaagagcaacagaaggctgaagccacagaacccctgaagtcagccaagccaggccaggaggaagacggacccctgaagggcaaaggtcaaggggccaccacagccgacggcaaagggaaagagaagaaggcgccgcccttgctggagggggcccccttgcgactgaagccccggagcatccacgagttgtctgtggagcagcagctctactacaaggagatcaccgaggcctgcgtgggctcctgcgaggccaagagggcggaagccctgcaaagcattgccacggaccctggactgtatcagatgctgccacggttcagtacctttatctcggagggggtccgtgtgaacgtggttcagaacaacctggccctactcatctacctgatgcgtatggtgaaagcgctgatggacaaccccacgctctatctagaaaaatacgtccatgagctgattccagctgtgatgacctgcatcgtgagcagacagttgtgcctgcgaccagatgtggacaatcactgggcactccgagactttgctgcccgcctggtggcccagatctgcaagcattttagcacaaccactaacaacatccagtcccggatcaccaagaccttcaccaagagctgggtggacgagaagacgccctggacgactcgttatggctccatcgcaggcttggctgagctgggacacgatgttatcaagactctgattctgccccggctgcagcaggaaggggagcggatccgcagtgtgctggacggccctgtgctgagcaacattgaccggattggagcagaccatgtgcagagcctcctgctgaaacactgtgctcctgttctggcaaagctgcgcccaccgcctgacaatcaggacgcctatcgggcagaattcgggtcccttgggcccctcctctgctcccaggtggtcaaggctcgggcccaggctgctctgcaggctcagcaggtcaacaggaccactctgaccatcacgcagccccggcccacgctgaccctctcgcaggccccacagcctggccctcgcacccctggcttgctgaaggttcctggctccatcgcacttcctgtccagacactggtgtctgcacgagcggctgccccaccacagccttcccctcctccaaccaagtttattgtaatgtcatcgtcctccagcgccccatccacccagcaggtcctgtccctcagcacctcggcccccggctcaggttccaccaccacttcgcccgtcaccaccaccgtccccagcgtgcagcccatcgtcaagttggtctccaccgccaccaccgcaccccccagcactgctccctctggtcctgggagtgtccagaagtacatcgtggtctcacttcccccaacaggggagggcaaaggaggccccacctcccatccttctccagttcctcccccggcatcgtccccgtccccactcagcggcagtgccctttgtggggggaagcaggaggctggggacagtccccctccagctccagggactccaaaagccaatggctcccagcccaactccggctcccctcagcctgctccgtgatgctccacctgccagcccccggattcccacacatgcagacatgtacacacgtgcacgtacacacatgcatgctcgctaagcggaaggaagttgtagattgcttccttcatgtcactttctttttagatattgtacagccagtttctcagaataaaagtttggtttgt

SEQ ID NO: 2258 - DNA, 3588 bp, Homo sapiens
ctggagactggaaggtccaagatcaagatactacagatttgatttctggacgttgaacatggtgtaggagtagaaaagcaacagggacggaaggagagaacttaccccttcaagcccttttataaggcactaaatcccatcattgagggcagagtcctcatagcctaatcacctcctaaatgctccatttcttaatattgttgcactgaggattaagcttcaacatgaattctgaagaggacacaaacatccaaaccatagcagtcaatgccttagcccttgatgttgctatcaacctgagattcggggatcaaggaaggacaggtaatagttaacctcttctgtgagaagtcagaaggtgatctctttaatgctttctttttaagaatttttcaaattgagactaattgcagaggttccagttgaccagcattcataggaatgaagacaaacacagagatggtgtgtctaagaaacttcaaaaggtgtagacctcctgactgaagcatattggatttatttaatttttttcactgtatttctgtcctcctacaagggaaagtcatgattacactaactgagctaaaatgcttagcagatgcccagtcatcttatcacatcttaaaaccatggtgggacgtcttctggtattacatcacactgatcatgctgctggtggccgtgctggccggagctctccagctgacgcagagcagggttctgtgctgtcttccatgcaaagtggaatttgacaatcactgtgccgtgccttgggacatcctgaaagccagcatgaacacatcctctaatcctgggacaccgcttccgctccccctccgaattcagaatgacctccaccgacagcagtactcctatattgatgccgtctgttacgagaaacagctccattggtttgcaaagtttttcccctatctggtgctcttgcacacgctcatctttgcagcctgcagcaacttttggcttcactaccccagtaccagttccaggctcgagcattttgtggccatccttcacaagtgcttcgattctccatggaccacccgcgccctttcagaaacagtggctgagcagtcagtgaggcctctgaaactctccaagtccaagattttgctttcgtcctcagggtgttcagctgacatagattccggcaaacagtcattgccctacccacagccaggtttggagtcagctggcatagaaagcccaacttccagtgtcctggacaagaaggagggtgaacaggccaaagccatctttgaaaaagtgaaaagattccgcatgcatgtggagcagaaggacatcatttatagagtatatctgaaacagataatagtcaaagtcattttgtttgtgctcatcataacttatgttccgtattttttaacccacatcactcttgaaatcgactgttcagttgatgtgcaggcttttacaggatataagcgctaccagtgtgtctattccttggcagaaatctttaaggtcctggcttcattttatgtcattttggttatactttatggtctgacctcttcctacagcctgtggtggatgctgaggagttccctgaagcaatattcctttgaggcgttaagagaaaaaagcaactacagtgacatccctgatgtcaagaatgactttgccttcatccttcatctggctgatcagtatgatcctctttattccaaacgcttctccatattcctatcagaggtcagtgagaacaaactgaaacagatcaacctcaataatgaatggacagttgagaaactgaaaagtaagcttgtgaaaaatgcccaggacaagatagaactgcatctttttatgctcaacggtcttccagacaatgtctttgagttaactgaaatggaagtgctaagcctggagcttatcccagaggtgaagctgccctctgcagtctcacagctggtcaacctcaaggagcttcgtgtgtaccattcatctctggtcgtagaccatcctgcactggcctttctagaggagaatttaaaaatcctccgcctgaaatttactgaaatgggaaaaatcccacgctgggtatttcacctcaagaatctcaaggaactttatctttcgggctgtgttctccctgaacagttgagtactatgcagttggagggctttcaggacttaaaaaatctaaggaccctgtacttgaagagcagcctctcccggatcccacaagttgttacagacctcctgccttcattgcagaaactgtcccttgataatgagggaagcaaactggttgtgttgaacaacttgaaaaagatggtcaatctgaaaagcctagaactgatcagctgtgacctggaacgcatcccacattccattttcagcctgaataatttgcatgagttagacctaagggaaaataaccttaaaactgtggaagagatcattagctttcagcatcttcagaatctttcctgcttaaagttgtggcacaataacattgcttatattcctgcacagattggggcattatctaacctagagcagctctctttggaccataataatattgagaatctgcccttgcagcttttcctatgcactaaactacattatttggatctaagctataaccacttgaccttcattccagaagaaatccagtatctgagtaatttgcagtactttgctgtgaccaacaacaatattgagatgctaccagatgggctgtttcagtgcaaaaagctgcagtgtttacttttggggaaaaatagcttgatgaatttgtcccctcatgtgggtgagctgtcaaaccttactcatctggagctcattggtaattacctggaaacacttcctcctgaactagaaggatgtcagtccctaaaacggaactgtctgattgttgaggagaacttgctcaatactcttcctctccctgtaacagaacgtttacagacgtgcttagacaaatgttgacttaaagaaaagagacccgtgtttcaaaatcatttttaaaagtatgctcggccgggcgtggtggctcatgcctataatcccagcactttgggaggccaagatgggcggattgcttgaggtcaggagttcgagaccagtctggccaacctggtgaaaccccatctctgctaaaactacaaaaaaattagccaggcgtggtggcgtgcgcctgtaatcccagctacttgggaggctgacgcaggggaattgcttgaaccagggaggtggaggttgcagtgagccgagattgtgccactgtacaccagcctgggtgacagagcaagactcttatctcaaaaaaaaaaaaaaatgctccagggctttaaatgagaagtaaaattttctaagttaataaagatgaagaatgggtgactattatgatgaaccataactaaatgtcttattaaagcaactgagtgtctagccctaaattaaccaggtaaaaactgttaacactaacctgaagttttgtgaataactgttctttaacttattgagatgttgcaagaaatgcacatccagggtggactgggagctatgaaatgactaaattcctccttgcagtgtttacct

SEQ ID NO: 2259 - DNA, 698 bp, Homo sapiens
gtttgagcagcattgttagagcctgtggaaaacactttacaactgtgtaactgtcttcatctttacagaggaatagtctacaaaggaagacttgtaacctggagaagagacctgtcatttactccatcctttatagtgatgctacaggacgaagaggaatggataaaaacattggcgagcaactcaataaagcgtatgaagccttccggcaggcatgcatggatagagattctgcagtaaaagaattacagcaaaagactgagaactatgagcagagaatacgtgaacaacaggaacagctgtcacttcaacagactattattgacaagctaaaatctcagttacttcttgtgaattccactcaagataacaattatggctgtgttcctctgcttgaagacagtgaaacaagaaagaataatttgactcttgatcagccacaagataaagtgatttcaggaatagcaagagaaaaactaccaaaggtagacattgcttctgcagaaagcagcatttaaatgctgatgcgtgacatagcttcctcattttatttttctgaagtgatctgctggaattccaaacagaagttccatatatacaaatatgtggcttaaatatttctaaatagaagaactattttcaagtaaaataaaggctgaggttttgtatttaaaaaaaaaaaaaaaaaaaaaaaaaaa

SEQ ID NO: 2260 - DNA, 3629 bp, Homo sapiens
ctggagaggatctacccgggtccctgcctggccagtggggaaacaccggtcccccaggcaccttcacctaaccagagcggggatttccaccgcccctcatgccgccctttggaggaaagtgaaagtgaaaggaggaagaggaggcttcatggctgaggaggtcgcagcgccatgaagtccctgtctctgctcctcgctgtggctttgggcctggcgaccgccgtctcagcaggacccgcggtgatcgagtgttggttcgtggaggatgcgagcggaaagggcctggccaagagacccggtgcactgctgttgcgccagggaccgggggaaccgccgccccggccggacctcgaccctgagctctatctcagtgtacacgaccccgcgggcgccctccaggctgccttcaggcggtatccccggggcgcccccgcaccacactgcgagatgagccgcttcgtgcctctccccgcctctgcgaaatgggccagcggcctgacccccgcgcagaactgcccgcgggccctggatggggcttggctgatggtcagcatatccagcccagtcctcagcctctccagcctcttgcgaccacagccagagcctcagcaggagcctgttctcatcaccatggcaacagtggtactgactgtcctcacccacacccctgcccctcgagtgagactgggacaagatgctctgctggacttgagctttgcctacatgccccccacctccgaggccgcctcatctctggctccgggtccccctccctttgggctagagtggcgacgccagcacctgggtaagggacatctgctcctggctgcaactcctgggctgaatggccagatgccagcagcccaagaaggggccgtggcatttgctgcttgggatgatgatgagccatggggcccatggaccggaaatgggaccttctggctgcctacagttcaaccctttcaggagggcacctatctggccaccatacacctgccatacctgcaaggacaggtcaccctggagcttgctgtgtacaaaccccccaaagtgtccctgatgccagcaacccttgcacgggccgccccaggggaggcacccccggaattgctctgccttgtgtcccacttctacccttctgggggcctggaggtggagtgggaactccggggtggcccagggggccgctctcagaaggccgaggggcagaggtggctctcggccctgcgccaccattccgatggctctgtcagcctctctgggcacttgcagccgcccccagtcaccactgagcagcatggggcacgctatgcctgtcgaattcaccatcccagcctgcctgcctcggggcgcagcgctgaggtcaccctggaggtagcaggtctttcagggccctcccttgaggacagcgtaggccttttcctgtctgcctttcttctgcttgggctcttcaaggcactgggctgggctgctgtctacctgtccacctgcaaggattcaaagaagaaagcagagtgagggcactcactgccatcctgtggaagccaccatcatctctggcccaagcttctgtagtagctccctaaaataataccctatcatctgctcctaatccctccaatctctctccactgagtggctggaatgcttttttttttttctttcacttatataagggataatttttcttttttttttttttttgagacggagtctcactcttccgcccaggctgcagtgcagtggcatgatcttggcttactgcaacctccgcctcctgggttcaagcaattctgtggcttcagcctccggagtagctgggattacaggcacatgccaccacacccagtgaatttttgtatttttagtagagacggggtttcaccatgttggccaggctggtcttgaattcctgacctcaggtgatctgcccacctcagcctcccaaagtgctgggattacaggcgtgagccaccacaccaggcccgagaaatgcttttttaaaaaacacacatcttatggcattcaccttcttggagctctaggacagtggttctcaaaatttttttctctcaggacctcttaaaaatcatcaaggaccccaaaaagcttttgggtatgtgggttatagctatcaatatttatggtactagaacttaaaagtgagaaaaatttaaaacacgagaatacataggcacacattctattcatcgtgggaaccatggtgtcaatacatatcatgtagcttctgaaaaactccactgtacacttatagaatgaagaaggcaaaaaacttttttttttttttttttgagacggagtctcgctctgtcgcccaggctggagtgcagtggcgcgatctcggctcactgcaagctccgcctctcgggttcacgccattctcctgcctcagcctcccaagtagctcggactacaggcgtcctccaccatgcctggctaatattttgtattttttagtagagacggggtttcaccgtgttagccaggatggtctcgatctcctaacctggtgatccgcccgcctcggcctcccaaagtattgggattacccgcgtgagccaccgcgcccggctgcaaataatctttctttttttctgagacagagtctcgctctgttgcccaggctggagtgcagtggcacgatctcggctcacggcacgctccgcctcccgggttcacgccattctcctgcctcagcttcccgagtagctgggactacaggggcccgccaccacgcccggctaactttttgtgtttttagtagagacggggtttcaccgtgttagccaggatggtctcgatctcctgaccttgtgatctgcccgcctcggcctcccaaagtgctgggattacaggcgtgagccaccgcgcccggcggcgaaacacgatattgtactaacatcttaattttgttataaaatctcacaaaccccctgacatagtctcagagatctgtagggccgaggttacatttggagaacccgtactctagggccaaatccattcttcttgccctggctcacttgtcccccccaccgccccgcgctggagccactgcctagttcttcagccctagatggtgctcgccagacctcctctcaatgctcatcacacacagggctattcctttcctccaatgaaccaaacgcctcccgcccacctccaggtcccagtcctctgttccctttgcctggtccacccttgccctccctgggtcgcagacgaggtcggcctcgtcattccccgcagaccgccgcgcgtccctcttgtgcggttcaccacagttgtatttaagtgatcgtgtgagtcgtcgttaaatgcctgtctccccgcggatcatgggctcctcgaggacagggactggcctgtctgtccactgctgtaaccccgcgccggcatagggacctaaggcccactggagggcgctcatcaagtagctgctggatgttgacgaaggaagcggcggcgcagctcagggatctccgagtcaggacggtcggccagacccacggggtaacgggtctaatcgtgtaggaataaagctgtattccagtgcttccaaaaaaaaaaaaaaaaaaaaaaaaaaaaaaaaaaaaaaaaaaaaaaaa

SEQ ID NO: 2261 - DNA, 1888 bp, Homo sapiens
gcctctccagctgcgacacagatggcgcgcgggctcttgggttctgtagttttctcgcgatccaaaaggctccgtgcccaagtgagtccttaccgcctccctacccagcggcttcccctccgctagtacgcatgtccacagcttcacggaccgggagagagggggcgcggaaggaaggaggcgggacggtattacaaacaaaaaaatacggccttctcgagaagcgacggcggagggcccgctcctcccagaaggcggtgcagcctgcccgggcgagccacgcacgcagagggttgtggggcggatagctcccctccagatggaggctcacgaagtagggtgggcgggggactccatatcccagcgtgccccgcggcgggccctaccggccgcgactccgggcttggccccggccctagctcgtcggctgtgtattggggcgcgtggaggctgcagtcacggtggcgcccgcggggacggaggagggaatgagtgaagaggagcaaggctccggcactaccacgggctgcgggctgcctagtatagagcaaatgctggccgccaacccaggcaagaccccgatcagccttctgcaggagtatgggaccagaatagggaagacgcctgtgtacgaccttctcaaagccgagggccaagcccaccagcctaatttcaccttccgggtcaccgttggcgacaccagctgcactggtcagggccccagcaagaaggcagccaagcacaaggcagctgaggtggccctcaaacacctcaaaggggggagcatgctggagccggccctggaggacagcagttctttttctcccctagactcttcactgcctgaggacattccggtttttactgctgcagcagctgctaccccagttccatctgtagtcctaaccaggagcccccccatggaactgcagccccctgtctcccctcagcagtctgagtgcaaccccgttggtgctctgcaggagctggtggtgcagaaaggctggcggttgccggagtacacagtgacccaggagtctgggccagcccaccgcaaagaattcaccatgacctgtcgagtggagcgtttcattgagattgggagtggcacttccaaaaaattggcaaagcggaatgcggcggccaaaatgctgcttcgagtgcacacggtgcctctggatgcccgggatggcaatgaggtggagcctgatgatgaccacttctccattggtgtgggctcccgcctggatggtcttcgaaaccggggcccaggttgcacctgggattctctacgaaattcagtaggagagaagatcctgtccctccgcagttgctccctgggctccctgggtgccctgggccctgcctgctgccgtgtcctcagtgagctctctgaggagcaggcctttcacgtcagctacctggatattgaggagctgagcctgagtggactctgccagtgcctggtggaactgtccacccagccggccactgtgtgtcatggctctgcaaccaccagggaggcagcccgtggtgaggctgcccgccgtgccctgcagtacctcaagatcatggcaggcagcaagtgaagccccagctggactcatggatgtgcaccctttgctccctgctctttctgcctctgggctcatgtatctgcgcagctctggtaccctctgtgggtgccatctctacctctgacacagactgcctgccttgaagctgagaaggcacagggcaaggagccaaggaccacagagcctcagccagcccaggatccgtcctcattttattggtgatgatgaatgggaatgaaatcagggggctgtctactagagcctggaataaatatgctgctttgtggatttttaaaaaaaaaaaaaaaaaa

SEQ ID NO: 2262 - DNA, 5009 bp, Homo sapiens
gagggggcggggcgaagcgagggtgcgcgccgctgttcgccgcgggctgctcgcgcgcacctgcgggtcggacccgctgcctaccgcgtgcccggcgtcctcgtcgcgcgagttgccggtcccgcggggcctgggctgcgggcccacgggtcccggggatggcgtcggagccgcgctaactccgtttctccttggaccaagatgactgatggaaaactctccacctctacaaatggcgtagccttcatgggtattctggatggtcgaccaggaaacccccttcagaacctgcaacacgtcaatctcaaggcgccccgactcctctccgcgcctgagtacgggcccaagctgaaactcagggctttagaagaccggcacagcctccagtccgtggactcggggattcctaccctggagatcgggaacccggagcctgtaccctgcagcgcggtccacgtgaggaggaagcagtccgactccgacctcatccccgagcgggccttccagagcgcctgcgcgctgccatcctgtgcgccaccagctcctagcagcaccgagcgggaacagagcgtgcgcaaatcctccacgtttcccaggacaggctatgactcggtaaagctctatagcccgacctccaaagccctgacccgcagcgatgatgtctccgtctgcagcgtgtccagtcttgggacagagctgtccaccacgctgtccgtcagcaatgaggacatcttggaccttgtggtcacgagcagctccagtgccattgtgaccctggagaatgacgatgacccacagtttaccaacgtcaccttgagctctatcaaggaaacccgtggcttacaccagcaggactgtgttcatgaagctgaggaggggagtaaattgaaaatattggggccatttagtaacttctttgcaaggaacttgcttgctagaaaacaaagtgcaaggcttgacaaacacaatgacttgggatggaagttatttgggaaagcgccactccgagagaatgcccagaaggattcaaagagaatacagaaggaatatgaagacaaggctggaagacctagcaagccaccctctccaaagcagaatgtgaggaagaatcttgactttgaaccactttccaccaccgcactcatcctcgaggacagaccagcaaatctcccagcaaaaccagctgaagaagctcagaagcacagacagcagtatgaagaaatggtggttcaggccaaaaagcgagagctgaaagaagcccagcgaaggaagaagcagctggaagaaagatgcagagtcgaggaaagcattggaaacgctgtgctcacctggaataatgagatcttacctaactgggaaacaatgtggtgctctagaaaagttcgagatttatggtggcagggaatccctccaagtgtgagaggcaaagtctggagcttagccattggcaacgagttaaatatcacccacgagctctttgacatctgtcttgcccgagccaaggagaggtggcggtcccttagcacaggaggctctgaagtggagaacgaagatgctggtttttcagcagcagacagagaagccagtctggagcttattaaactggacatttctagaacatttcctaatctctgcattttccagcaaggtggtccatatcatgacatgttgcacagtattttgggcgcttatacttgttaccggccagatgtgggttatgtccagggcatgtccttcatagcagcagtgttgatcttgaacttagatactgcagatgcctttattgccttttctaaccttctgaataaaccctgtcaaatggcgttttttagagtggaccatggccttatgttgacttattttgctgcatttgaagtattctttgaagaaaatttgccgaaattatttgcgcatttcaagaagaacaacctaactccagatatctacctaattgattggatctttaccttatatagtaaatctctgcccctcgacctggcctgtcgtatctgggacgtgttctgtcgcgatggggaagagttcctgttccgcacggccctgggcatcctgaagctgttcgaggacatcctgaccaagatggacttcattcacatggcccagttcctgacccggctgcccgaggacctgcccgccgaggagctgtttgcctccatcgccacgatccagatgcagagccgaaacaagaagtgggctcaggtactgactgcattgcagaaagacagccgggaaatggagaagggaagtccgtccctccgacactgaggctgcagcgggaattcgcactcggcaccaatcagagccccatgccgcggcccctctgttgtttcagactgacacccgggcagccgagaagaacagacgctctttaagtttgattcctaacactggagttggccttaaacaaaacaaacacaaaaacttttaaagaattaaaccaaggcttagccttaagcagctcagtggaaggatgagctgctgcggaccacagccagccactgcatctgctgcacagttgaacgatgggcagtggctcacccccactcctttatttcagcaaaagctaattaaattgtaatgtttctatgtcaactactgggaagtatgttacagtcttagccaggatgcatgagagatgttatttgggagacttgagatgctttggctgatatttacatgttttcgataagaaagggatcgctgattgagttattgagatagtttttccagagctggaggtcacgtttctaaaactcacctacgaaagatagcattaaaggaacaggggctctctgaggatggccactgatgtgtgtttgtggatacctgggcatcgacccagcctgcaggtgagctctgggccatgttgccttgacacagtcacagtgtagaggctgcaggtgcacacgtgggctccagtgggactgcgctctgggagactgctccctggcatcggtcctgcggaggtggaaagttcgagaggaggagctatttgcgaggaagccctgtggcaatagagataggcttaaaagcggagagaacacagagtggaatcagccccctgtaagtaaaagggtagagaaagagatgtgtggctgggccctctcccacctgcctgttcagtggaggccagggcagcagcccagaacagcacatgtgggggaggtggccccttgtgccagcagtggctcctctctgcctttgagccctgcacagctggacccatcctaagtgccagtgagtccctcacacatttgactttagaacgtgtgcttcatgacccgttgtacagacggaggagcgagcaacacacgtctaacagcctagacaatctcgtcagatgctcatactggaccatcagcctccccattttagctgactttcccagggtcgttggcaaattttttgttctgtcttttccttgactaattgtagaactttgtgtgaggactttggttatccaaaatcacagaaatgaaccgttttgcagctgcgcagtctaaagggcaggccagtgtctggaagcagggcccacgtggcggtccgctggcaggctggtcctggggagcattctgcggacccggtcacgggcttggttagtcatgcgtacatgtgtgccttggggtgctctgcactccacggcccttctcagccacacttcccaccccagggggtgcccccaggctgatctcatttctgatgttgagggctgtttggctctgtctgtatagcttgtaacaggagccttgggctaggggctggggaaggaaagccgagctggcattcgttctctggactttttatgcctgccatacccgctaatgctcctcgaggtgcaggagcaggttgctgagccagtggctgccccgtgccctccttcccagcactatcatgtgtcacgtttcccggactctgcccctacatctcagctgaatctccagggaggctgcagagcatcgtggagaccactttctgcctcggcctttaaatgctgactcacctcctctcggaggaggcgtcctgtcttcacgggggggtcccggtggcctccagacgtagccatttcctgacatcaagatgttgaatgtaatctggtctgagctgggcctgtgggaggggccgcctgaggcctgtgcgctgttgtcctcgcagatgtacttatttttgttcatgttacgggcgttccgttccttaaagatgtatatattttcttactgtacataaagatgttccttaagtcgtacagaaggtggcgcggcaaagggcctcgtgcagtgtgttcagattgcccctggggatcttctgtgtcttcagcgcccagccctgcgtgttcctggtgaagcagtttcacatcagtctctccagatagcactacgatgtattccgcttctgaacaggatcccatgccagtgtggaacaccttcccaatcttagttcagaagtggcttgtatgacctgttcaggggtcacatgaggtctcgccagtttcctgggtcctcttcagaggccagaaagttctaagttctgagtccccggccagggtcccttaacacctcggcacagaggctgttggcaagtgtagaggctgcctctgtgtgtggtttaagtaaactggaaatgagacattgacgtgctgctcctccagaggtctgcacactccacttcacatgccgttgactctcacagtctaagacttcagggccgggacctttgtccagcctgcacagtagagtgaggctgcctctcccgccaggcattgggatcccatttagaaacggcattcacttcagaaggtactttttaactgctcagtttttgactattttaaatagtttgctgaaaactcctgataacacttgctacatatcatgttttaattgcttgtacagttaacctttaattttatttagtaaagtgtatcaaagtaggacttttttgaattgtaaataggtggttttattaaataaaagtcaatgtaaaattgttactta

SEQ ID NO: 2263 - DNA, 3431 bp, Homo sapiens
cagagagcccccgtggagtggtgaggggtgatgtgataaagtcaacggggggcattcgttccctcccctgggagcagaggcccttctagtgtgtcaggctctgggcggagggcagcagcccctgggcaggcatcggagcttccagcctggggagaccttggagatcatcttggccagagtgaagacccacccagggagggccaggaccacctgtgggctgtgcacatgtgaccctgacgaggatgtgccccaaactacatgtgatgttcttcatttccaaatcaatctggccacgtcggagtcatccttgccgcagcatcgcttgcacatgtgatgttcttcatttccaaatcaacctggccacgtcggagtcttccttgctgcagcatcgcttgcacatgtgatgttcttcatttccaaatcaacctggccacgtcggagtcatccttgctgcagcatcgcttgcacatgtgatgttcttcatttccaaatcaacctggccacgtcagagtcatccttgctgcagcatcgcttgcacatgtgatgttcttcatttccaaatcaatctggccacgtcggagtcatccttgctgcagcatcgcttgcacatgtgatgttcttcatttccaaatcaacctggccatgtcggagtcatccttgctgcagcatcgcttgcactcacctccagcccatacatcaatgggagagaaagggcctgagtttcagccagtaaataccctggaattgtgaggtatagctctaagaatgtgttacgtgactgaacggcttctgtaatgtccatcccagcagaattgagagccactgctatagctgatccttctctgaggctcaggtccttgcttgaaccttcccagcgcttgtctggcttctccttgtatgccccagcagcagggagctcattccctccactggatgggcaacttgcaaaaggaaaactcagagatgtttatcacagcattattcataatcaaaaaccaactgcaaacaccccaggttcaaattaaaaaacgacaggaaaaggattatgagtaagttctggtaaattcacccaatagaatcatcaccagaggttaaaaatgatcactgggaagcttatgtagcaacattgaaaggttttacaaagtgacactgagttaattttacagtatgattgtaaatatatgataaaatatgttgattttaaaaacaaacactacttgagcacttgctatgttttggtccctgtacttagtgttgtcacacattatctcacttagtctcccaactgcccagtaggttagttggtatttgccccttttacagatgaggaaacagagggtcagagtggttcagtggcctgcctgaggccttccagccagaacatcagccaggacttaaattcagacctactggtccctttaccacatcatgctgacatcaagaatagagaagggtgctatgagtattttatttttctttcagacttcctcttctgttgccattattggaaatttctaaggaaaagaagctttgggggctcatttgagggtgtgactccccaggaccagggagatgtttatgtccaactgataacatattttactctcttctccaggatgacatggaagcttaccggacccagaactgcttcctcaactccgagatccaccaggtcacaaagatctggagaaaggtggctgagaaggagaaggcccttctgacgaagtgcgcctacctccaagccagaaactgccaggtggaaagcaagtacctggccggtctgagaaggctgcaggaggccctgggggacgaagccagcgagtgctcagagctgctgaggcagcttgtccaggaggcactgcagtgggaagctggggaggcctcatctgacagcatcgagctgagccccatcagtaagtatgatgagtacggcttcctgacggtgcccgactatgaggtggaagacctgaagctgctggccaagatccaggcgttggagtcacgatcccaccacctgctgggcctcgaggctgtggatcggccgctgagggagcgctgggctgccctgggcgatcttgtgccctcagccgagctcaagcagctactgcgggcaggagtaccccgtgaacaccggcctcgtgtctggaggtggctggtccacctccgtgtccagcacctgcacactccaggctgctaccaggaactgctgagccggggccaggcccgcgagcaccctgctgcccgccagattgagctggacctgaaccggaccttccccaacaacaaacacttcacctgccccacctccagcttccccgacaagctccgccgggtgctgctggccttctcctggcagaaccccaccatcggctactgccagggcctgaacaggctggcggccattgccctgctggtcctagaggaggaggagagcgccttctggtgcctggtggccattgtggagaccatcatgcccgctgattactactgcaacacgctgacggcatcccaggtggaccagcgggtgctccaggacctgctctcggagaagctgcccaggctgatggcccatctggggcagcaccacgtggatctctccctcgtcaccttcaactggttcctcgtggtctttgcggacagtctcattagcaacatcctccttcgggtctgggatgccttcctgtacgaggggacgaaggtggtgtttcgctatgccttggccattttcaagtacaacgagaaggagatcttgaggctacagaatggcctggaaatctaccagtacctgcgcttcttcaccaagaccatctccaacagccggaagctgatgaacatcgccttcaatgacatgaaccccttccgcatgaaacagctgcggcagctgcgcatggtccaccgggagcggctggaggctgagctgcgggagctggagcagcttaaggcagagtacctggagaggcgggcatcccggcgcagagctgtgtccgagggctgtgccagcgaggacgaggtggagggggaagcctgacttggccacctcccctccccacagccttcctcacccttggctggcagacccactggaggtcaggcacggaccagtggcccagccctgggtgtcccatcaccatgtgaccttggacatgtcccttcccctctctggccctcagtttccccactgggacattgtgtgctgcaaagccattggttgggctacttcttcataggcacttacttacccagggatgccaccctttcgtcacctcttccacagagcactttggcatgtaaacaagcaagagcactgcctctatagggtaacctggaacattctctaggttatatcaatataaaacaatgtaaatggtggaaatcaaaaaaaaaaaaaaaaaaaaaaaaaaaaaaaaaaaaaaaaaaaaaaaaaaaaaaaa

SEQ ID NO: 2264 - DNA, 5886 bp, Homo sapiens
gtgaggagggccggcggcggggcggacccctggcggtcctcctggctggggtccgcgcgctcgcggcagctccccgtggaggtcactgtccgtgccagtccctcccgctgtcccgccctctcccgctgccgccgccgccgccgccgcgcccgcctcagcgcccccactccgcgcttgggagcgaggagccgccagcgcccccgccccgccgccgccgcagcgccctcaggccgccattcgccaccgaaactttccagcgcccgcgctctctccgggactcggcggcggcggggcgggggcggcccgggggcggcgcgcggctgctccggggcgccgggccctcttcggccgccgcacggccgggactcggaggctgccggctggagggaggttcggagcgcggccgggcgcgcggcgccgccacaagttgcgctgctcgcgacgagatttccgtgagggtggaagaaaatcataccatatcagatgcctcgcagagcaccaggcccaccgtgaaaggctggtccctgcagacggcttcccatttttatgaccggatgctgggaagcctgctggtccacaggtccatacatgaagtcaccataaggagccctggcctccttgcagaaacatcgaggtgacatgtagcatgaccgagctcgctggcgcctcttcatcgtgctgccaccgccctgcaggaagaggggccatgcagtcagtcttgcaccactttcaacgtttgcgagggagagagggtggttcccacttcatcaacacctcatcgccgcgaggtgaggctaagatgagcataaccagtgacgaggtgaactttctggtgtatcggtatctccaggagtcaggtttttcccactcggctttcacgtttgggattgagagccacatcagccagtccaacatcaatgggacgctagtgccaccggccgccctcatctccattctccagaagggcctgcagtatgtagaggccgagatcagtatcaacgaggatggcacagtgttcgacggccgccccatagagtccctgtcactgatagacgccgtgatgcccgacgtggtgcagacgcggcagcaggcattccgagagaagctcgctcagcagcaagccagtgcggcggcggcggcggctgcggccacggcagcagcgacagcagccaccacgacctcagccggcgtttcccaccaaaatccatcgaagaacagagaggccacggtgaatggggaagagaacagagcacattcagtcaataatcacgcgaagccaatggaaatagatggagaggttgagattccatccagcaaagccacagtccttcggggccatgagtctgaggtgttcatttgtgcctggaatcctgtcagtgatttgctagcctccggatctggagactcaactgcaaggatatggaacctgaatgagaatagcaacgggggctccacccagctcgtgttgaggcactgtatacgagaggggggccatgacgtcccgagtaacaaagacgtcacctcactggactggaataccaatggaacactcttggctacgggttcatatgacggttttgcaagaatatggacggaagatggtaacctggccagcaccttaggccaacataaaggccccatctttgccttgaaatggaaccgaaaggggaattacattttgagtgctggtgtagacaaaacaacaataatttgggatgcccacacaggagaagccaaacagcagtttccttttcattcagcccctgcccttgatgtggactggcagaacaacacgacctttgcctcctgtagcacagacatgtgtatccatgtgtgcaggctcggctgtgaccgcccagtcaaaaccttccagggacacacaaacgaggtcaacgccatcaaatgggatccgtctggaatgttgctggcatcctgctcggatgacatgacattgaagatctggagcatgaaacaggaggtgtgcatccatgatcttcaggctcacaataaagagatctacaccatcaagtggagccccactgggcccgccaccagcaacccaaactccaacatcatgttggcaagtgcttcgtttgattctacggtgcgactgtgggacatagaacgaggcgtctgcacccacacgctcacgaagcatcaggagcctgtctatagcgtagctttcagccctgatgggaagtacttggccagtggatccttcgacaagtgcgtccatatctggaatactcagagtggaaatcttgtccacagctaccgaggcactggcggcatcttcgaggtgtgctggaacgcccgaggagacaaagtgggtgccagcgcgtccgacggctctgtgtgtgttttggatctgcggaagtaaccacaaaatattatcgaaaaaagaaaagaattctaatgaccagccgtgaatgtgtagggttgcagctctattctccaaaactgtaggaacttgacttgcgttagagtgtactctgaaaccaactcgtctctggccgcaggagtctatatgttttcgtaatcttcatcaagaagtttttaaaaggcaagcaaaaacagaagcaaatcatatcaaacggggatagaatggtttccactgaggacattcagcctgggaaggaggaagtcaccagctcgaggcgtgtggattggtttccacccggaacaggctctgtgatggctgaatggaaagaaacgtaaaaagctgtgccaaaaaaaaagcaaaatgctgtgataaaccaaacagggaagggggaaaaaccctcctccttgggatttttttttttttgttttccctaacaatttggacactacaattgctctcacaaaggaggttcaaagaccagtttgtaccgatgaaacgcgcaactttgtaatcccaacactttctattttctagaatcttctttgttcattgggtggtttttcagtcggctggaattctatcttctgggggccttccgtctgagatggaagctgtcttgggcttgttgtctcttccttctgttgctccctgcccctccccctgtctttccactctgtctggtgagctctgctttttcagtgcaccatcaagagatgcagccccgtggacatgaagacacaatctcccacggacagctttcccccttccgccctctcccaccctctcctccccttgcgctcgcgctcgcgctcgctttctcactggcgtgctctctttctctctctctctccctctgtacctttctcatagttgcttcagatcttaggtctcaagggcactttggcgcgtagtaagtgctttatgtaagaaggcagggcaggggggcctttttacaggagaaaaaaaaatgacttataagagaaagagcctggagtatttttggaaaaaaaaataatatttttatgttaaaacaattttaaaatcttaaaatggccatcagacatagagagctttgtgtgattcatgttttaaaaagaaccgaagaagccacaggcagggcctgagggagcccctggctttcccctcagcctcaggaaaggtggtcaggaaaactctggctggacaagggtcagtcttcggggtcagcagcgagattgctctgcagccagtgagggaggtccccgccatgccggctggaagaagaacctcgcatcttttggtgtgtatgcaccttggcagccagcaggaaagcagcgaagagccgcgcgccctctggcctcaagggagcattggcagaaccataaggtactgcagaagccgtcgaaaccgactgctcggctggattaggcgtgttggctacatctttcccacaaccgtataacgaccgatggtcatttctccaagagcaggcttggcgagtccttgcagagctgacatagaggcgcccgcatgtcacttagtctaacgctgacagaaatgaatgcagaaggaagattttcagtcctgaacgtgaattatagaggtagaacgtcgctaataatttctgccatcttcataatttctttgtctcacagaagactaggagaaagatcttttttaaataatctttttgctgtttttaaaaaattaaacaaggctttgtgttcctagaagagcttcatttcagtgaatctggtgacctccatctgcttgctgtcataacccgacacggacttatttttgtcattagcaagggggaaaaggccaaaggacaagggcctcttctcccattggttttcctgtgggcagaagggctgaggaagatggcccagcccgtgggggctgctgggtcaccagcagcgggtagggtgcaatctggtgtgtgttccagcagtgagacggtgttattgtgaaggtggcattcatctgcggagccaaaacccagccatcggggaagggtcagggcttctgtggaacttggaacgtgccaggaccacctgcaaaagccagggtgcgttgatcattctcagatcattgattggcctccacttgggtatgtgaattattcatgtcccagaagaccaaaaagtgctctggttctgagatgagtattttattcgtgttctgtttccgaaacacttagcaaagaaggtcacagtgatgtggagtcgccgcacccatctttgaagatagccagtgtccctggatgaggtgatgatttcccgtcccaaggactctgtgaagtttagagtacagtttgttggggtccaaaagacaccatctctaccccacccaaataaaaatgcactcatctctgtagaacatctgctgtcaaaggccagcctgtcgttagggcatggcttatgcttgacaaaccagtaacaactgtgggatggcgatggtgggatgtgtcgcaagcaattcactagacaatcttcacatgaatgtcggtagccagggtctctcccgagggatggctttagtcttgatgaatgtgaaccatgtcggaattgttaggtagaaacctgggctgggaggcctcggaccccaggctccatccctggcttccccagcctgcggccgcaagcaaaaccaagcgcgagatgcagctagcacccttcatatccatccccgttctcagcgggacaacaccatggacagccgttttcagagcctccagcatttgcacaccactactcaccctctctgctgctggcatgttggtagagtcatccctgtaatcaagaaatggcctgtggaatgttattgttcaacgttgtttacagctcttaaaacatggtgaggaatgcctaagtcttagtgaccaaacgtgaccttgaaagcagacatagcatgacagaccttcctagagtgtttggtcgggttcacagtgaccgagagtcaggtccagcacacacctgggaaagggatgctgccccaagggggaccaaaagggccggacgttacagggtgaaaccctctgacccctcgcgacaccgtaggacttgacttttgtttagtctttctaagaaatagatcatggagccaagtgaagtgcactttgtcaaatgtaagggtctgctttgttcttgttgcttttctgttttttaaccttttgttccgccatttaaaaaaagaaaaaaaaaaagcttatgtttcttgtcaaatgcagaaatgttccttccgccactcactgaagttttgcattctggcttgtgcagtttttattgtctgtgtcagacgtacagccagacatgttctctattggcatttttccgattctgttcagatgacagcgaccgccttttcattccccccgccacctgtactcaccctcacgctctttgaagaaaaaaaaaaaaaatcaccttgtgtgttgtagctcatttgtttcaagagagaatcaacagatcatattcagtgtcttgaataaattgctctattttgatattaaaaaaaaaaaa

SEQ ID NO: 2265 - DNA, 1293 bp, Homo sapiens
tgggctgcggcattcacgtgatctgcacgggcgcagatgtaggcaccggtccgagtgcctgccctctgtccccgcggctgggtctcgtctgctccggttcctgggctcctaattcttggtccagcttcttccaggtctgcgcgtctgttgttcccagcgctctgcgaagcctgaaaaggaggagcaacctgtccagaatccccgcagacaggaaaaggaggggaaatctcgacatggaaaaactctacagtgaaaatgaaggaatggcttcaaaccaaggaaagatggaaaatgaagaacagccacaagacgagagaaagccagaagtaacttgtactctggaagacaagaagttagaaaacgagggaaagacagaaaacaagggcaaaacaggagatgaggaaatgttaaaggataaaggaaagccagagagtgagggagaggcaaaagaaggaaagtcagagagggagggagagtcagagatggagggaggatcagagagagagggaaaaccagagatagagggaaagccagagagtgaaggagagccagggagtgaaacaagggctgcaggaaagcgcccagctgaggatgatgtacccaggaaagccaaaagaaaaactaataaggggctggctcattacctcaaggagtataaagaggccatacatgatatgaatttcagcaatgaggacatgataagagaatttgacaatatggctaaggtgcaggatgagaagagaaaaagcaaacagaaattgggggcgtttttgtggatgcaaagaaatttacaggaccccttctaccctagaggtccaagggaattcaggggtggctgcagggccccacgaagggacattgaagacattccttatgtgtagtgtccctggcaggcatttaccaggccatgtgctttaacgttacggtaatactttactttaggcatccctcctgttgctagcagccttttgacctatctgcaatgcagtgttctcagtaggaaatgttcatctgttacatggaaaaaatgttgatggtgcattgtaaaattaaaaaacacaacttgcagaaccaaatatatggcatcagtacatttttgtaaaactacaaagatacttacctagtaatatagtatagaaaacaattctgaaagctgtgtccactaaaagattaacagtggttatctctgggtgattttttctgttcttttttgttcatctgtccatttttctcctaaaaacagatttctttagtcataaaaataataaaatataaagtattggaaaaaaaaaa

SEQ ID NO: 2266 - DNA, 4396 bp, Homo sapiens
gcctgaggtgcccgccctggccccaggagaatgaaccagccgcagaggatggcgcctgtgggcacagacaaggagctcagtgacctcctggacttcagcatgatgttcccgctgcctgtcaccaacgggaagggccggcccgcctccctggccggggcgcagttcggaggttcaggtcttgaggaccggcccagctcaggctcctggggcagcggcgaccagagcagctcctcctttgaccccagccggaccttcagcgagggcacccacttcactgagtcgcacagcagcctctcttcatccacattcctgggaccgggactcggaggcaagagcggtgagcggggcgcctatgcctccttcgggagagacgcaggcgtgggcggcctgactcaggctggcttcctgtcaggcgagctggccctcaacagccccgggcccctgtccccttcgggcatgaaggggacctcccagtactacccctcctactccggcagctcccggcggagagcggcagacggcagcctagacacgcagcccaagaaggtccggaaggtcccgccgggtcttccatcctcggtgtacccacccagctcaggtgaggactacggcagggatgccaccgcctacccgtccgccaagacccccagcagcacctatcccgcccccttctacgtggcagatggcagcctgcacccctcagccgagctctggagtcccccgggccaggcgggcttcgggcccatgctgggtgggggctcatccccgctgcccctcccgcccggtagcggcccggtgggcagcagtggaagcagcagcacgtttggtggcctgcaccagcacgagcgtatgggctaccagctgcatggagcagaggtgaacggtgggctcccatctgcatcctccttctcctcagcccccggagccacgtacggcggcgtctccagccacacgccgcctgtcagcggggccgacagcctcctgggctcccgagggaccacagctggcagctccggggatgccctcggcaaagcactggcctcgatctactccccggatcactcaagcaataacttctcgtccagcccttctacccccgtgggctccccccagggcctggcaggaacgtcacagtggcctcgagcaggagcccccggtgccttatcgcccagctacgacgggggtctccacggcctgcagagtaagatagaagaccacctggacgaggccatccacgtgctccgcagccacgccgtgggcacagccggcgacatgcacacgctgctgcctggccacggggcgctggcctcaggtttcaccggccccatgtcgctgggtgggcggcacgcaggcctggttggaggcagccaccccgaggacggcctcgcaggcagcaccagcctcatgcacaaccacgcggccctccccagccagccaggcaccctccctgacctgtctcggcctcccgactcctacagtgggctagggcgagcaggtgccacggcggccgccagcgagatcaagcgggaggagaaggaggacgaggagaacacgtcagcggctgaccactcggaggaggagaagaaggagctgaaggccccccgggcccggaccagcccagacgaggacgaggacgaccttctccccccagagcagaaggccgagcgggagaaggagcgccgggtggccaataacgcccgggagcggctgcgggtccgtgacatcaacgaggcctttaaggagctggggcgcatgtgccaactgcacctcaacagcgagaagccccagaccaaactgctcatcctgcaccaggctgtctcggtcatcctgaacttggagcagcaagtgcgagagcggaacctgaatcccaaagcagcctgtttgaaacggcgagaagaggaaaaggtgtcaggtgtggttggagacccccagatggtgctttcagctccccacccaggcctgagcgaagcccacaaccccgccgggcacatgtgaaaggtatgcctccgtgggacgagccacccgctttcagccctgtgctctggccccagaagccggactcgagaccccgggcttcatccacatccacacctcacacacctgttgtcagcatcgagccaacaccaacctgacaaggttcggagtgatgggggcggccaaggtgacactgggtccaggagctccctggggccctggcctaccactcactggcctcgctccccctgtccccgaatctcagccaccgtgtcactctgtgacctgtcccatggatcctgaaactgcatcttggccctgttgcctgggctgacaggagcattttttttttttccagtaaacaaaacctgaaagcaagcaacaaaacatacactttgtcagagaagaaaaaaatgccttaactataaaaagcggagaaatggaaacatatcactcaagggggatgctgtggaaacctggcttattcttctaaagccaccagcaaattgtgcctaagcgaaatattttttttaaggaaaataaaaacattagttacaagattttttttttcttaaggtagatgaaaattagcaaggatgctgcctttggtctctggtttttttaagctttttttgcatatgttttgtaagcaacaaatttttttgtataaaagtcccgtgtctctcgctatttctgctgctgttcctagactgagcattgcatttcttgatcaaccagatgattaaacgttgtattaaaaagaccccgtgtaaacctgagccccccccgtccccccccccggaagccactgcacacagacagacggggacaggcggcgggtcttttgtttttttgatgttgggggttctcttggttttgtcatgtggaaagtgatgcgtgggcgttccctgatgaaggcaccttggggcttccctgccgcatcctctcccctcaggaaggggactgacctgggcttgggggaagggacgtcagcaaggtggctctgaccctcccaggtgactctgccaagcagctgtggccccagcggtaccctacacaacgccctccccaggcccccctaagctgctctcccttggaacctgcacagctctctgaaatggggcattttgttgggaccagtgacccctggcatggggaccacaccctggagcccggtgctggggacctcctggacaccctgtccttcactccttgccccagggacccaggctcatgctctgaactctggctgagaggagtctgctcaggagccagcacaggacaccccccaccccaccccaccatgtccccattacaccagagggccatcgtgacgtagacaggatgccaggggcctgaccagcctccccaatgctggggagcatccctggcctggggccacacctgctgccctccctctgtgtggtccaagggcaagagtggctggagccgggggactgtgctggtctgagccccacgaaggccttgggctgtggctccgaccctgctgcagaaccagcagggtgtcccctcgggcccatctgtgtcccatgtcccagcacccaggcctctctccaggtctccttttctggtcttttgccatgagggtaaccagctcttcccagctggctgggactgtcttgggtttaaaactgcaagtctcctaccctgggatcccatccagttccacacgaactagggcagtggtcactgtggcacccaggtgtgggcctggctagctgggggccttcatgtgcccttcatgcccctccctgcattgaggccttgtggacccctgggctggctgtgttcatccccgctgcaggtcgggcgtctccccccgtgccactcctgagactccaccgttacccccaggagatcctggactgcctgactcccctccccagactggcttgggagcctgggccccatggtagatgcaagggaaacctcaaggccagctcaatgcctggtatctgcccccagtccaggccaggcggaggggaggggctgtccggctgcctctcccttctcggtggcttcccctgcgccctgggagtttgatctcttaagggaacttgcctctccctcttgttttgctcctgccctgcccctaggtctgggtggcagtggccccatagcctctggaactgtgcgttctgcatagaattcaaacgagattcacccagcgcgaggaggaagaaacagcagttcctgggaaccacaattatggggggtggggggtgtgatctgagtgcctcaagatggttttcaaaaaattttttttaaagaaaataattgtatacgtgtcaacacagctggctggatgattgggactttaaaacgaccctctttcaggtggattcagagacctgtcctgtatataacagcactgtagcaataaacgtgacattttataaag

SEQ ID NO: 2267 - DNA, 2568 bp, Homo sapiens
cgccacccgcttcctcgccgcagggggcccgcccgctggcccgtttccggtccggtgggtacaagatgacggagccgggcgcctctcccgaggacccttgggtcaaggcaagccccgtgggcgcgcacgccggcgaggggagggcgggtcgggctcgtgcacgtaggggggccggaagacgaggggcttccctcctgtccccaaagtcccccacgctctccgtgccccggggctgcagagaagacagctctcaccccgcgtgtgccaaggtggagtatgcctacagcgacaacagcctggaccccgggctttttgtagaaagcacccgcaaggggagtgtagtgtccagagctaatagcatcggttccaccagtgcctcttctgtccccaacacagatgatgaggacagtgattaccaccaggaggcctacaaggagtcctacaaagaccggcggcggcgcgcacacactcaggctgagcagaagaggagggacgccatcaagagaggctatgatgaccttcagaccatcgtccccacttgccagcagcaggacttctccattggctcccaaaagctcagcaaagccatcgttctacaaaagaccattgactacattcagtttttgcacaaggagaagaaaaagcaggaggaggaggtgtccacgttacgcaaggatgtcaccgccctaaagatcatgaaagtgaactatgagcagattgtgaaggcacaccaggacaacccccatgaaggggaggaccaggtctctgaccaggtcaagttcaacgtgtttcaaggcatcatggattccctgttccagtccttcaatgcctccatctcagtggccagcttccaggagctgtcagcgtgtgtcttcagctggatcgaggagcactgtaagcctcagaccctgcgggagattgtgattggcgtcctgcaccaattgaaaaaccagctttactgaccggttcttggaaacctggagaacagccaacaagaggcccttgaatctctacgtggccactgaactgctgggcccgggagactggactacaacacctcacactggtcagctggtttctacttggtgtttggtttttcccagccccattttatcttcagcggagccgcggtgtttgttttgtgaaagcttctgattaatttattatattgacgataaaactcaaacctacccagccttccccccactccatggaagtccttgggatgggcgtctgctctggacaccccaaagagctcctgccctctcagccctttattcaagcctcagatttctgctcatgatctacatagatttggaaactgttttcctctgttttggtctcttgggcaacatttttggcccaagtttgggcaacatttggcccaagtttgggcattttggcagtagctgtatgggagaaaaagagtaagaggaaatattcccacagccatgaagggtgaaagggcaccttgtgcctagactagggctgcctggtcagtcccaggtgaggccaagggctttctggccatctcagggaggggccaccaggttcctcccctcaccccatattccatcaccttcctcctctgctctgggtggtaagggaagccctcccggttcccacaggctatgatgctgcatggcagaggcaggtataacacagcactacatattggaaattttttatttttctaaataccaatgcagttttgctacggttacaattttgaaatattaactgagcctcaaaatcaccctttctgtcaagcatatcttggcctctcccatgtctcagtgttgcctgcatttctcccaggacttgggggtggggtgaaaagcgtacaaaagatacttaaaagggctcctggggtacacaagcccagcaggtcctgagtgaagccgtgggccctccaaatgctcgttttatagcaacctctctctaccctagttctccaaattcacttctgccttcctcaggtttgatatctggcaggtttgactatccagaggaaattaaatatttttatataaaattaaattataataaatattgccaaatgctttcctttagcattgttccaagtctaaatgttaacctcaagctactgcaatttagacaatgaaatgggctgggtctacccccagccaccagccctcatcctctctacccagtgctctggtttatgcttgtctcctgactgctctgcttaaaggtgaaagtagcaggaacaacaacaaaagccaaccaaaaacaaggtagccagtgcaagacatctcactcttctgacatcctgcagtccccaccagtcctgaccgtgggcccctcaggggtctgggagtgtgacgttgtaatcttcatccgtctctatcccaacttcctcctgtgagacagggagacaagtgaatgagatgtcaccaggataagaccacagggaagcaaagaaggaagagagctccacttacaaagaactgcttcttgctcttggggtatccttcaagtattgcatcagacagctctgtagcctgacaagaaataaaaccacccgttttcagatgggcaaaaaaa

SEQ ID NO: 2268 - DNA, 2316 bp, Homo sapiens
cgccacccgcttcctcgccgcagggggcccgcccgctggcccgtttccggtccggtgggtacaagatgacggagccgggcgcctctcccgaggacccttgggtcaaggtggagtatgcctacagcgacaacagcctggaccccgatgatgaggacagtgattaccaccaggaggcctacaaggagtcctacaaagaccggcggcggcgcgcacacactcaggctgagcagaagaggagggacgccatcaagagaggctatgatgaccttcagaccatcgtccccacttgccagcagcaggacttctccattggctcccaaaagctcagcaaagccatcgttctacaaaagaccattgactacattcagtttttgcacaaggagaagaaaaagcaggaggaggaggtgtccacgttacgcaaggatgtcaccgccctaaagatcatgaaagtgaactatgagcagattgtgaaggcacaccaggacaacccccatgaaggggaggaccaggtctctgaccaggtcaagttcaacgtgtttcaaggcatcatggattccctgttccagtccttcaatgcctccatctcagtggccagcttccaggagctgtcagcgtgtgtcttcagctggatcgaggagcactgtaagcctcagaccctgcgggagattgtgattggcgtcctgcaccaattgaaaaaccagctttactgaccggttcttggaaacctggagaacagccaacaagaggcccttgaatctctacgtggccactgaactgctgggcccgggagactggactacaacacctcacactggtcagctggtttctacttggtgtttggtttttcccagccccattttatcttcagcggagccgcggtgtttgttttgtgaaagcttctgattaatttattatattgacgataaaactcaaacctacccagccttccccccactccatggaagtccttgggatgggcgtctgctctggacaccccaaagagctcctgccctctcagccctttattcaagcctcagatttctgctcatgatctacatagatttggaaactgttttcctctgttttggtctcttgggcaacatttttggcccaagtttgggcaacatttggcccaagtttgggcattttggcagtagctgtatgggagaaaaagagtaagaggaaatattcccacagccatgaagggtgaaagggcaccttgtgcctagactagggctgcctggtcagtcccaggtgaggccaagggctttctggccatctcagggaggggccaccaggttcctcccctcaccccatattccatcaccttcctcctctgctctgggtggtaagggaagccctcccggttcccacaggctatgatgctgcatggcagaggcaggtataacacagcactacatattggaaattttttatttttctaaataccaatgcagttttgctacggttacaattttgaaatattaactgagcctcaaaatcaccctttctgtcaagcatatcttggcctctcccatgtctcagtgttgcctgcatttctcccaggacttgggggtggggtgaaaagcgtacaaaagatacttaaaagggctcctggggtacacaagcccagcaggtcctgagtgaagccgtgggccctccaaatgctcgttttatagcaacctctctctaccctagttctccaaattcacttctgccttcctcaggtttgatatctggcaggtttgactatccagaggaaattaaatatttttatataaaattaaattataataaatattgccaaatgctttcctttagcattgttccaagtctaaatgttaacctcaagctactgcaatttagacaatgaaatgggctgggtctacccccagccaccagccctcatcctctctacccagtgctctggtttatgcttgtctcctgactgctctgcttaaaggtgaaagtagcaggaacaacaacaaaagccaaccaaaaacaaggtagccagtgcaagacatctcactcttctgacatcctgcagtccccaccagtcctgaccgtgggcccctcaggggtctgggagtgtgacgttgtaatcttcatccgtctctatcccaacttcctcctgtgagacagggagacaagtgaatgagatgtcaccaggataagaccacagggaagcaaagaaggaagagagctccacttacaaagaactgcttcttgctcttggggtatccttcaagtattgcatcagacagctctgtagcctgacaagaaataaaaccacccgttttcagatgggcaaaaaaa

SEQ ID NO: 2269 - DNA, 4138 bp, Homo sapiens
cttctgtgctgttccttcttgcctctaacttgtaaacaagacgtactaggacgatgctaatggaaagtcacaaaccgctgggtttttgaaaggatccttgggacctcatgcacatttgtggaaactggatggagagatttggggaagcatggactctttagccagcttagttctctgtggagtcagcttgctcctttctggaactgtggaaggtgccatggacttgatcttgatcaattccctacctcttgtatctgatgctgaaacatctctcacctgcattgcctctgggtggcgcccccatgagcccatcaccataggaagggactttgaagccttaatgaaccagcaccaggatccgctggaagttactcaagatgtgaccagagaatgggctaaaaaagttgtttggaagagagaaaaggctagtaagatcaatggtgcttatttctgtgaagggcgagttcgaggagaggcaatcaggatacgaaccatgaagatgcgtcaacaagcttccttcctaccagctactttaactatgactgtggacaagggagataacgtgaacatatctttcaaaaaggtattgattaaagaagaagatgcagtgatttacaaaaatggttccttcatccattcagtgccccggcatgaagtacctgatattctagaagtacacctgcctcatgctcagccccaggatgctggagtgtactcggccaggtatataggaggaaacctcttcacctcggccttcaccaggctgatagtccggagatgtgaagcccagaagtggggacctgaatgcaaccatctctgtactgcttgtatgaacaatggtgtctgccatgaagatactggagaatgcatttgccctcctgggtttatgggaaggacgtgtgagaaggcttgtgaactgcacacgtttggcagaacttgtaaagaaaggtgcagtggacaagagggatgcaagtcttatgtgttctgtctccctgacccctatgggtgttcctgtgccacaggctggaagggtctgcagtgcaatgaagcatgccaccctggtttttacgggccagattgtaagcttaggtgcagctgcaacaatggggagatgtgtgatcgcttccaaggatgtctctgctctccaggatggcaggggctccagtgtgagagagaaggcataccgaggatgaccccaaagatagtggatttgccagatcatatagaagtaaacagtggtaaatttaatcccatttgcaaagcttctggctggccgctacctactaatgaagaaatgaccctggtgaagccggatgggacagtgctccatccaaaagactttaaccatacggatcatttctcagtagccatattcaccatccaccggatcctcccccctgactcaggagtttgggtctgcagtgtgaacacagtggctgggatggtggaaaagcccttcaacatttctgttaaagttcttccaaagcccctgaatgccccaaacgtgattgacactggacataactttgctgtcatcaacatcagctctgagccttactttggggatggaccaatcaaatccaagaagcttctatacaaacccgttaatcactatgaggcttggcaacatattcaagtgacaaatgagattgttacactcaactatttggaacctcggacagaatatgaactctgtgtgcaactggtccgtcgtggagagggtggggaagggcatcctggacctgtgagacgcttcacaacagcttctatcggactccctcctccaagaggtctaaatctcctgcctaaaagtcagaccactctaaatttgacctggcaaccaatatttccaagctcggaagatgacttttatgttgaagtggagagaaggtctgtgcaaaaaagtgatcagcagaatattaaagttccaggcaacttgacttcggtgctacttaacaacttacatcccagggagcagtacgtggtccgagctagagtcaacaccaaggcccagggggaatggagtgaagatctcactgcttggacccttagtgacattcttcctcctcaaccagaaaacatcaagatttccaacattacacactcctcggctgtgatttcttggacaatattggatggctattctatttcttctattactatccgttacaaggttcaaggcaagaatgaagaccagcacgttgatgtgaagataaagaatgccaccatcattcagtatcagctcaagggcctagagcctgaaacagcataccaggtggacatttttgcagagaacaacatagggtcaagcaacccagccttttctcatgaactggtgaccctcccagaatctcaagcaccagcggacctcggaggggggaagatgctgcttatagccatccttggctctgctggaatgacctgcctgactgtgctgttggcctttctgatcatattgcaattgaagagggcaaatgtgcaaaggagaatggcccaagccttccaaaacgtgagggaagaaccagctgtgcagttcaactcagggactctggccctaaacaggaaggtcaaaaacaacccagatcctacaatttatccagtgcttgactggaatgacatcaaatttcaagatgtgattggggagggcaattttggccaagttcttaaggcgcgcatcaagaaggatgggttacggatggatgctgccatcaaaagaatgaaagaatatgcctccaaagatgatcacagggactttgcaggagaactggaagttctttgtaaacttggacaccatccaaacatcatcaatctcttaggagcatgtgaacatcgaggctacttgtacctggccattgagtacgcgccccatggaaaccttctggacttccttcgcaagagccgtgtgctggagacggacccagcatttgccattgccaatagcaccgcgtccacactgtcctcccagcagctccttcacttcgctgccgacgtggcccggggcatggactacttgagccaaaaacagtttatccacagggatctggctgccagaaacattttagttggtgaaaactatgtggcaaaaatagcagattttggattgtcccgaggtcaagaggtgtacgtgaaaaagacaatgggaaggctcccagtgcgctggatggccatcgagtcactgaattacagtgtgtacacaaccaacagtgatgtatggtcctatggtgtgttactatgggagattgttagcttaggaggcacaccctactgcgggatgacttgtgcagaactctacgagaagctgccccagggctacagactggagaagcccctgaactgtgatgatgaggtgtatgatctaatgagacaatgctggcgggagaagccttatgagaggccatcatttgcccagatattggtgtccttaaacagaatgttagaggagcgaaagacctacgtgaataccacgctttatgagaagtttacttatgcaggaattgactgttctgctgaagaagcggcctaggacagaacatctgtataccctctgtttccctttcactggcatgggagacccttgacaactgctgagaaaacatgcctctgccaaaggatgtgatatataagtgtacatatgtgctggaattctaacaagtcataggttaatatttaagacactgaaaaatctaagtgatataaatcagattcttctctctcattttatccctcacctgtagcatgccagtcccgtttcatttagtcatgtgaccactctgtcttgtgtttccacagcctgcaagttcagtccaggatgctaacatctaaaaatagacttaaatctcattgcttacaagcctaagaatctttagagaagtatacataagtttaggataaaataatgggattttcttttcttttctctggtaatattgacttgtatattttaagaaataacagaaagcctgggtgacatttgggagacatgtgacatttatatattgaattaatatccctacatgtattgcacattgtaaaaagttttagttttgatgagttgtgagtttaccttgtatactgtaggcacactttgcactgatatatcatgagtgaataaatgtcttgcctactcaaaaaaaaaaaa

SEQ ID NO: 2270 - DNA, 1707 bp, Homo sapiens
gtggtaggctgcgaccccttcctcccacagccccttcccgcccctcgccgggcatccgccgacaggacaggagagatttacaaatagtgttttggcatcatggaacgtgtaggttgtactttaacgacaacttacgcccaccctagaccaacaccaaccaactttctaccagccatcagtaccatggcctcaagctacagggaccgctttccccactccaatttgacccatagcctgagccttccttggagacccagcacatactacaaagtcgcctccaattccccaagcgtggccccgtactgcaccagatcacagagggtgtccgagaataccatgcttccctttgtttccaacagaaccactttcttcacaagatacacaccggatgactggtacaggtccaatttaaccaactatcaagagtccaacacttcccgacataattcggagaaactaagagtggatacatctcgcctgattcaagacaaatatcaacaaacaagaaaaactcaggcagacacaacccaaaatctgggagaacgtgtcaatgacatagggttttggaaatctgaaatcattcatgagttggatgaaatgattggagagacaaatgcacttactgatgtgaagaaaagactggagcgggctttgatggagactgaagcccctcttcaggtagcccgagaatgtctatttcatcgagaaaagagaatgggaatcgacctagttcacgatgaagttgaagcacaactgctgacggaagttgatactattctgtgttgtcaagaaagaatgaagctacatttggataaggctattgcccaacttgcagccaacagagcgtcccagcatgagctggaaaaggacctgagtgacaaacagacggcttaccggatcgacgacaaatgccaccacctgcgcaacacatcagacggtgtcggctacttccgcggagtggagagggtcgatgcaactgtctcagtgcctgagtcctgggccaaatttacagatgacaatattctccgctcccagagtgaacgggcagcttccgctaagctaagagacgacattgaaaacctcttggttgtgactgccaatgagatgtggaatcaattcaacaaagtgaacttgtctttcaccaatcgcattgctgagactgcagatgctaagaataagattcagacgcacttagcaaagaccctgcaggagattttccagactgaaatgaccatagaatccatcaagaaggccatcaaggacaagactgccttcctgaaggtggctcagaccagactggatgagcgcacaagacggccgaacattgagttgtgccgagacatggctcagctacgccttgttaacgaggtacacgaggttgacgacaccatccagaccctgcagcagcgcctgagggatgcagaggacaccctgcagtcgctggtccacatcaaagccacactcgagtatgacctggctgtcaaagccaattccctgtacatcgaccaggaaaaatgcatgagcatgcgcaagagctaccccaacaccctccggctggtcggcttctgctagggaccccaccgggtgtggttttgatacccctaagttaaggctgagccagagcactgtctcagcatttgaaccgaatgctaatatagtcacttattaaaggattatgctgatggaaatgtaccaaaaaaaaaaaaa

SEQ ID NO: 2271 - DNA, 2318 bp, Homo sapiens
gcacagaagcgagtccgactgtgctcgctgctcagcgccgcacccggaagatgaggctcgccgtgggagccctgctggtctgcgccgtcctggggctgtgtctggctgtccctgataaaactgtgagatggtgtgcagtgtcggagcatgaggccactaagtgccagagtttccgcgaccatatgaaaagcgtcattccatccgatggtcccagtgttgcttgtgtgaagaaagcctcctaccttgattgcatcagggccattgcggcaaacgaagcggatgctgtgacactggatgcaggtttggtgtatgatgcttacctggctcccaataacctgaagcctgtggtggcagagttctatgggtcaaaagaggatccacagactttctattatgctgttgctgtggtgaagaaggatagtggcttccagatgaaccagcttcgaggcaagaagtcctgccacacgggtctaggcaggtccgctgggtggaacatccccataggcttactttactgtgacttacctgagccacgtaaacctcttgagaaagcagtggccaatttcttctcgggcagctgtgccccttgtgcggatgggacggacttcccccagctgtgtcaactgtgtccagggtgtggctgctccacccttaaccaatacttcggctactcgggagccttcaagtgtctgaaggatggtgctggggatgtggcctttgtcaagcactcgactatatttgagaacttggcaaacaaggctgacagggaccagtatgagctgctttgcctggacaacacccggaagccggtagatgaatacaaggactgccacttggcccaggtcccttctcataccgtcgtggcccgaagtatgggcggcaaggaggacttgatctgggagcttctcaaccaggcccaggaacattttggcaaagacaaatcaaaagaattccaactattcagctctcctcatgggaaggacctgctgtttaaggactctgcccacgggtttttaaaagtcccccccaggatggatgccaagatgtacctgggctatgagtatgtcactgccatccggaatctacgggaaggcacatgcccagaagccccaacagatgaatgcaagcctgtgaagtggtgtgcgctgagccaccacgagaggctcaagtgtgatgagtggagtgttaacagtgtagggaaaatagagtgtgtatcagcagagaccaccgaagactgcatcgccaagatcatgaatggagaagctgatgccatgagcttggatggagggtttgtctacatagcgggcaagtgtggtctggtgcctgtcttggcagaaaactacaataagagcgataattgtgaggatacaccagaggcagggtattttgctgtagcagtggtgaagaaatcagcttctgacctcacctgggacaatctgaaaggcaagaagtcctgccatacggcagttggcagaaccgctggctggaacatccccatgggcctgctctacaataagatcaaccactgcagatttgatgaatttttcagtgaaggttgtgcccctgggtctaagaaagactccagtctctgtaagctgtgtatgggctcaggcctaaacctgtgtgaacccaacaacaaagagggatactacggctacacaggcgctttcaggtgtctggttgagaagggagatgtggcctttgtgaaacaccagactgtcccacagaacactgggggaaaaaaccctgatccatgggctaagaatctgaatgaaaaagactatgagttgctgtgccttgatggtaccaggaaacctgtggaggagtatgcgaactgccacctggccagagccccgaatcacgctgtggtcacacggaaagataaggaagcttgcgtccacaagatattacgtcaacagcagcacctatttggaagcaacgtaactgactgctcgggcaacttttgtttgttccggtcggaaaccaaggaccttctgttcagagatgacacagtatgtttggccaaacttcatgacagaaacacatatgaaaaatacttaggagaagaatatgtcaaggctgttggtaacctgagaaaatgctccacctcatcactcctggaagcctgcactttccgtagaccttaaaatctcagaggtagggctgccaccaaggtgaagatgggaacgcagatgatccatgagtttgccctggtttcactggcccaagtggtttgtgctaaccacgtctgtcttcacagctctgtgttgccatgtgtgctgaacaaaaaataaaaattattattgattttatatttc

SEQ ID NO: 2272 - DNA, 1636 bp, Homo sapiens
gaattccggctctctgggtgagagaccgagaggggcatatccgttcacgccgatccatgaaaatgctttggaaattgacggataatatcaagtacgaggactgcgaggaccgtcacgacggcaccagcaacgggacggcacggttgccccagctgggcactgtaggtcaatctccctacacgagcgccccgccgctgtcccacacccccaatgccgacttccagcccccatacttccccccaccctaccagcctatctacccccagtcgcaagatccttactcccacgtcaacgacccctacagcctgaaccccctgcacgcccagccgcagccgcagcacccaggctggcccggccagaggcagagccaggagtctgggctcctgcacacgcaccgggggctgcctcaccagctgtcgggcctggatcctcgcagggactacaggcggcacgaggacctcctgcacggcccacacgcgctcagctcaggactcggagacctctcgatccactccttacctcacgccatcgaggaggtcccgcatgtagaagacccgggtattaacatcccagatcaaactgtaattaagaaaggccccgtgtccctgtccaagtccaacagcaatgccgtctccgccatccctattaacaaggacaacctcttcggcggcgtggtgaaccccaacgaagtcttctgttcagttccgggtcgcctctcgctcctcagctccacctcgaagtacaaggtcacggtggcggaagtgcagcggcggctctcaccacccgagtgtctcaacgcgtcgctgctgggcggagtgctccggagggcgaagtctaaaaatggaggaagatctttaagagaaaaactggacaaaataggattaaatctgcctgcagggagacgtaaagctgccaacgttaccctgctcacatcactagtagagggagaagctgtccacctagccagggactttgggtacgtgtgcgaaaccgaatttcctgccaaagcagtagctgaatttctcaaccgacaacattccgatcccaatgagcaagtgacaagaaaaaacatgctcctggctacaaaacagatatgcaaagagttcaccgacctgctggctcaggaccgatctcccctggggaactcacggcccaaccccatcctggagcccggcatccagagctgcttgacccacttcaacctcatctcccacggcttcggcagccccgcggtgtgtgccgcggtcacggccctgcagaactatctcaccgaggccctcaaggccatggacaaaatgtacctcagcaacaaccccaacagccacacggacaacaacgccaaaagcagtgacaaagaggagaagcacagaaagtgaggctctcctcccgccccgcccctcccacgcctcaccagccccccgcgcgcccaccctccggcgggtgacagctccgggatcagcaacccttcctgctgctgctactgctgctgctgctgccgccgccgccgccgccgctgcccttgggtccccccgagtctccgggactgccctctcgactgtcagtggggcagcctctccgactctgcacccgcctcgacctccccacccgctcccacacccctgtgcccccggaattc

SEQ ID NO: 2273 - DNA, 2149 bp, Homo sapiens
gacctgcaaacacacacacacacacacacacacacacacacacacacacacatacacacgcaccagggcagccgagagacctccctcccgcccctcccatgcccgcctccctcccctcgccgccgccgccgccgccagcatctgggaccggccgattctgcacctccgtccggcgctgccctttgattcggatttccatcttgcattctccggctgatcgcgggacctggctcgtgcagaggaggggggccgatcgctatggagtatttcatggtgcccactcagaaggtgccctctttgcaacatttcaggaaaacagagaaagaagtgataggagggctctgtagccttgccaacattccactaacccccgagactcagcgggaccaggagcggcggattcggcgggagatcgccaacagcaacgagcggagacgcatgcagagcatcaacgcgggattccagtccctcaagaccctcatcccccacacagacggagagaagctcagcaaggcagccattctccagcagacagccgagtacatcttctccctggagcaggagaagaccaggctcttgcagcagaacacacagctcaagcgcttcatccaggagctgagcggctcgtcccccaagcgacggcgggcagaggacaaggacgaaggcataggctccccggacatctgggaggacgagaaggcggaggacctgcggcgggagatgattgagctgcggcagcagctggacaaggagcgctcggtgcgcatgatgctggaggagcaggtgcgctcgctggaggcccacatgtacccggaaaagctcaaggtgattgcgcagcaggtgcagctgcagcagcagcaggaacaggtgaggctgctgcaccaggagaagctggagcgggaacagcagcagctgcggacccagcttctgccccctccggcccccacccaccaccccacggtgatcgtgccagcaccgcctcctcctccctcccaccacatcaatgtcgtcaccatgggcccctcctcggtcatcaactctgtttccacatcccggcaaaatctggacaccatcgtgcaggcaatccagcacatcgagggcacccaggaaaagcaggagctggaggaggagcagcggcgagctgtcatcgtgaagcctgtccgcagctgcccggaggcccccacctctgacaccgcctccgactccgaggcctcagacagtgacgccatggaccagagccgggaggagccgtcgggggacggggagcttccctgactacccccccagccctcctctcccttctgggggctggagggagccggggcagccacagggagagacatgggcgaatgagtgagaaatttttacaaaattacgatgtcatttgggtctcttttatgacctctttttcaatactgtaaatcgacctttgaacgaagccactcaacccgaggtcccggggctggggtgtcgcagagctgtgggagcatcggcaccccagggcggggcctcggccccgggggctggaggaagctgacacggagatgcctggcctctctctgccaaaaagcattttttcctttaaatatgttttttaagaacagggaaaattaaacaaaaccccaggttatttcttccctgcccagagccagcctgggattgtcagccttcaatcccctttccttcctctttttgggttttcttctttctcctttaagcacttacatggttgggggtaagactaggctggggcattctgggggcccggaggtctccgttgcttcttggttggggtttgctgctgctgtgcccccctcccccttccccatctcggcactagaattcgccactctcccaccccccagcccccacctctgcctccaggtctcatcttccaccccaaaaatgtctgtctctctctttttgttttgtttgttgttggttttttatttctttttggtttgctttctgtttttgttttgtttttcttttttttctttcttttttttttttttacaattttgaggtcttcgtgttcaaggagaagctattatattttgttaagaaagtggggagaaaaaaaaccaagaggccaccgtgcctttgtaaagaaacaaaataaagtttgtactttgttttttaaaaaaaa

SEQ ID NO: 2274 - DNA, 2385 bp, Homo sapiens
cgtcccggcgccactcggcccagggcagggaccccgccacggccgggaccgcccggcccggccccagcccgcgcctctccgcgccgccccgcgctccgcaccgcgccctctccgcgtccccgcccgcgcggccggaccgggcagccagaaaaatcatttttcttctctgggaaggtgaacatttgtagcattgatttcccggatctggtaacatggcaaaagatgccggtctaattgaagccaacggagaactcaaggtcttcatagaccagaaccttagtcccgggaaaggcgtggtgtccctcgtggccgttcacccctccaccgtcaacccgctcgggaagcagctcttgccaaaaacctttggacagtccaatgtcaacattgcccagcaagtggtaattggtacgcctcagagaccggcagcgtcaaacaccctggtggtaggaagcccacacacccccagcactcactttgcctctcagaaccagccttccgactcctcaccttggtctgccgggaagcgcaacaggaaaggagagaagaatggcaagggcctacggcatttctccatgaaggtctgcgagaaggtgcagaggaaagggaccacttcctacaacgaagtggcagacgagctggttgcggagttcagtgctgccgacaaccacatcttaccaaacgagtcagcttatgaccagaaaaacataagacggcgcgtctacgatgccttaaacgtgctaatggccatgaacatcatctccaaggagaagaaggagatcaagtggattggtctgcccaccaactcggctcaggaatgtcagaacttagaggtggaaagacagaggagacttgaaagaataaaacagaaacagtctcaacttcaagaacttattctacagcaaattgccttcaagaacctggtgcagagaaaccggcatgcggagcagcaggccagccggccaccgccacccaactcagtcatccacctgcccttcatcatcgtcaacaccagcaagaagacggtcatcgactgcagcatctccaatgacaaatttgagtatctgtttaattttgacaacacatttgaaatccacgatgacatagaagtgctgaagcggatgggcatggcttgcgggctggagtcggggagctgctctgccgaagaccttaaaatggccagaagtctggtccccaaggctctggagccatacgtgacagaaatggctcagggaactgttggaggcgtgttcatcacgacggcaggttccacgtctaacggcacaaggttctctgccagtgacctgaccaacggtgcagatgggatgctggccacaagctccaatgggtctcagtacagcggctccagggtggagactccggtgtcctacgtcggggaggacgacgaggaggacgatgacttcaacgagaatgacgaggacgactgacgtcctccccacttcagattcggcttcaggaaaacgtttagcgaaaagaaactttttttttaatgtgggttttctgtttccttttggcctactcccaagaagatattggtaagctattgaatttagatatgcacctctgataagcaaggattgtttcccgtaggattaggacgtgctgtggatgtgtgttttgataccagtgtgctgatgcagagcgtttatttagttgttaggattttgtgttttcatttgctatttttctttaagtgcagagttcatttttgcccctgaaaagtttttgctgagtttgctgaagaaattgtatttcaaccacatccatgaaaataaaacacctcctgttgtggatggtgagcccctgatgccgcttatttgccgtgagtttggacggcacccctgctggcggatagcaagactctgtggagtttgttcagtggtacggtgtccaagcaaacagcagaatgcaactttctaaacagccccaagcaaacagcagaattcaactttttaaacaataaacaccatcaaccttattgactttattgtcccttaaattatattgactgttgtgattccatcaagtttgtacactcttttctctccctgttttgcagcaacaaattgcgaagtgcttttgtttgtttgttttcgtttggttaaagcttattgccatgctggtgcggctatggagactgtctggaaggcttggaatggtttattgcttatggtaaaatttgcctgatttcttacaggcagcgtttggaaaccttttattatatagttgtttacatacttataagtctatcatttaaagacatgtactgaaacaaatgtatttgtttcataagcatcttcctgtaatctattataaaattgaaattaaatatagagaatgttttaacaaaaaaaaaaaaaaaaaaaa

SEQ ID NO: 2275 - DNA, 1680 bp, Homo sapiens
cacggcagccctacactcggcctggaagaattgtttttcttctctggaaaggtgaacatttatagcatttatttcccaaatctgttaacatggcaaaatatgtcagtctcactgaagctaacgaagaactcaaggtcttaatggacgagaaccagaccagccgccccgtggccgttcacacctccaccgtgaacccgctcgggaagcagctcttgccgaaaacctttggacagtccagtgtcaacattgaccagcaagtggtaattggtatgcctcagagaccagcagcatcaaacatccctgtggtaggaagcccaaacccacccagcactcactttgcctctcagaaccagcattcctactcctcacctccttgggccgggcagcacaacaggaaaggagagaagaatggcatgggcctgtgccgtctttccatgaaggtctgggagacggtgcagaggaaagggaccacttcctgccaggaagtggtgggcgagctggtcgccaagttcagagctgccagcaaccacgcctcaccaaacgagtcagcttatgacgtgaaaaacataaaacggcgcacctacgatgccttaaacgtgctgatggccatgaatatcatctccagggagaaaaagaagatcaagtggattggtctgaccaccaactcggctcagaactgtcagaacttacgggtggaaagacagaagagacttgaaagaataaagcagaaacagtctgaacttcaacaacttattctacagcaaattgctttcaagaacctggtgctgagaaaccagtatgtggaggagcaggtcagccagcggccgctgcccaactcagtcatccacgtgcccttcatcatcatcagcagtagcaagaagaccgtcatcaactgcagcatctccgacgacaaatcagaatatctgtttaagtttaacagctcctttgaaatccacgatgacacagaagtgctgatgtggatgggcatgacttttgggctagagtccgggagctgctctgccgaagaccttaaaatggccagaaatttggtcccaaaggctctggagccgtacgtgacagaaatggctcagggaacttttggaggtgtgttcacgacggcaggttccaggtctaatggcacgtggctttctgccagtgacctgaccaacattgcgattgggatgctggccacaagctccggtggatctcagtacagtggctccagggtggagaccccagcagtcgaggaggaagaggaggaggacaacaacgatgacgacctcagtgagaatgacgaggatgactgacgtcctctcgccttaagattcagcttcaggaaaacatttagggaaaagaaactttttttttttttttaatgtgaggttttctgtttcttttttgcctactcccaagaagatattggtaagctatagaatttagatatgcacctctgataagcaaggattgtttcccgtatgattaagacgtgctgttgatgtgtgttttgataccagtgtgctgacacagaatctttatttactttttaggattttgtgttttcattttctatttttctttaaatgcagagttcattgttgccccttaacagtttttcctgagtttactgaagaaattgtacttcatccacatccatgaaaataaaatgctctccttttgtgc

SEQ ID NO: 2276 - DNA, 398 bp, Homo sapiens
gatgctggggctggtcctggccttgctgtcctccagctctgctgaggagtacgtgggcctgtctgcaaaccagtgtgccgtgccggccaaggacagggtggactgcggctacccccatgtcacccccaaggagtgcaacaaccggggctgctgctttgactccaggatccctggagtgccttggtgtttcaagcccctgactaggaagacagaatgcaccttctgaggcacctccagctgcccctgggatgcaggctgagcacccttgcccggctgtgattgctgccaggcactgttcatctcagtttttctgtccctttgctcccggcaagctttctgctgaaagttcatatctggagcctgatgtcttaacgaataaaggtcccatgctccacccg

SEQ ID NO: 2277 - DNA, 3927 bp, Homo sapiens
attcccaactgccagtgatctctgaagccgactctgaggctccctctttgctctaacagacagcagcgactttaggctggataatagtcaaattcttacctcgctctttcactgctagtaagatcagattgcgtttctttcagttactcttcaatcgccagtttcttgatctgcttctaaaagaagaagtagagaagataaatcctgtcttcaatacctggaaggaaaaacaaaataacctcaactccgttttgaaaaaaacattccaagaactttcatcagagattttacttagatgatttacacaatgaagaaagtacatgcactttgggcttctgtatgcctgctgcttaatcttgcccctgcccctcttaatgctgattctgaggaagatgaagaacacacaattatcacagatacggagttgccaccactgaaacttatgcattcattttgtgcattcaaggcggatgatggcccatgtaaagcaatcatgaaaagatttttcttcaatattttcactcgacagtgcgaagaatttatatatgggggatgtgaaggaaatcagaatcgatttgaaagtctggaagagtgcaaaaaaatgtgtacaagagataatgcaaacaggattataaagacaacattgcaacaagaaaagccagatttctgctttttggaagaagatcctggaatatgtcgaggttatattaccaggtatttttataacaatcagacaaaacagtgtgaacgtttcaagtatggtggatgcctgggcaatatgaacaattttgagacactggaagaatgcaagaacatttgtgaagatggtccgaatggtttccaggtggataattatggaacccagctcaatgctgtgaataactccctgactccgcaatcaaccaaggttcccagcctttttgaatttcacggtccctcatggtgtctcactccagcagacagaggattgtgtcgtgccaatgagaacagattctactacaattcagtcattgggaaatgccgcccatttaagtacagtggatgtgggggaaatgaaaacaattttacttccaaacaagaatgtctgagggcatgtaaaaaaggtttcatccaaagaatatcaaaaggaggcctaattaaaaccaaaagaaaaagaaagaagcagagagtgaaaatagcatatgaagaaatttttgttaaaaatatgtgaatttgttatagcaatgtaacattaattctactaaatattttatatgaaatgtttcactatgattttctatttttcttctaaaatgcttttaattaatatgttcattaaattttctatgcttattgtacttgttatcaacacgtttgtatcagagttgcttttctaatcttgttaaattgcttattctaggtctgtaatttattaactggctactgggaaattacttattttctggatctatctgtattttcatttaactacaaattatcatactaccggctacatcaaatcagtcctttgattccatttggtgaccatctgtttgagaatatgatcatgtaaatgattatctcctttatagcctgtaaccagattaaggaatacagctcttaaaaaatcaagaacttcctgagtttcacatataaaatggtgacaaacacctgcttctgataaagtttatccaattttgtatttatagtattctattgtaataatagaattctattatgtgcttccctccttagacatagtttttctccttttgtactaaccagtacttccatctatattgagctaaactgtctttgaacagtcaactctgcatcatgtgcctgcctgatttggattggtttcacttttttttttgtttgaccatagcccattctatcagtcaagatgactgaataattgtgtgttaaatacaactcatgataaggagaacctttatggaaacaagaagttttatggcaatcgagagggaattatttatatgtacttcttaatactatgcttcccaatattttttcttactaaaaataacaaaaatatttaaaccttctgaaatctattcagttatcattaggatttgcacacaatgcaactaataattcatgctttaaaaagtaggttatttctgttgaagagaaaattatcagcagggaagagtctactagaaaattcatgtgctagtcattcttggggatttaatattttgctggagttaattcactatatccagacctgtatctttcatttattgctgagccatgtgcagtctggcatctcaacaacctcaacaacctcaacaacctccaagacatgtcagtttctgtagtgttcacctcaaatctgacactggaattggaactgatttagaaacaaccatttcattcatttggtatgactagcttcatgactagcttcatgaatagcttcatgaatagcttcatgacttctcgctaacaatgatagtataattctgcctgttcttcaggattgaaattttgaactcaatttagatttcctgttttccctcatataccacatctaaacagtctccaaatctttatgcttttttttttttttttcgaaaaagttcacccaatccctaggctttttacttttttctttttcttttcttttttcttgtttttttttttttttcattttgttttgttttgttatgtttttttagacagggtcccactctgtcacccaggctggagtgcagtggtgcaatcacaggacactgaaacctcccacctagctgggactagaggtgcaggccaccacaccagctaatttatgtaatttttgtagagacgagtttcaccacgttacctaggcttgtcttgaacacctgggctcaagcaatcttccagccccagcctcccaaagtgctgggattacaggtataaaccacaatgcccccgtttttactctttactgcatccttcccatcagtattaattcctcagaaatttagtacattcctccaccatttcaaaatgctcccagaactcacactagttggtacttaactacaaccttcaacctcaccatttaattttgatgtatgtttttggatttaccaacagtactttctttcatgactactttgatttagttaagaatgctcactgtacactgaatgttaattactcagctaattcacactgatttcctgtttaaaaatatgatcccctccaggccattcatgtgaagtcagggtacagctgatgccagctacagaatcactatgtttcaatatggaatatgaaaagtcctaacacataattgcaaatcattttctactatggtatacaaattttatcattacaaaatagtatcagcttttttcacttaaggaaaataatacatcttcattcaaatattcagtgcataaataattgccttaaattgagtctttgctgtggaatttgagagttttggaaatcaaaggcccttgtgaaacatttcctgttgccatttatttatagatagcaatagcttcaaatgagtgggaaagtctacttaggtgaagtggtaaatagtcactaagattgtataaatagcgcattgatgagttgcctaattgttttctccaacaataaccactggtccattggttcactacttactcaagaaagacatatactgagatggcttgaaatgtttaatgcatgtgaacgttatttttaccgtgttttggaaaaagatcttgatgttattgtcttcctttattttccacaattaagtgcatctaactgtgaattgtatatggaattacattattcagcatatacatatatttacctgctttgttcattctctgtattcaaaattaacagatcatgctgaaaaccactcaaacgattatattttttacattataagaagtaaaatatattattctgaataatgaaaaaaaaaaaaaa

SEQ ID NO: 2278 - DNA, 1166 bp, Homo sapiens
attcccaactgccagtgatctctgaagccgactctgaggctccctctttgctctaacagacagcagcgactttaggctggataatagtcaaattcttacctcgctctttcactgctagtaagatcagattgcgtttctttcagttactcttcaatcgccagtttcttgatctgcttctaaaagaagaagtagagaagataaatcctgtcttcaatacctggaaggaaaaacaaaataacctcaactccgttttgaaaaaaacattccaagaactttcatcagagattttacttagatgatttacacaatgaagaaagtacatgcactttgggcttctgtatgcctgctgcttaatcttgcccctgcccctcttaatgctgattctgaggaagatgaagaacacacaattatcacagatacggagttgccaccactgaaacttatgcattcattttgtgcattcaaggcggatgatggcccatgtaaagcaatcatgaaaagatttttcttcaatattttcactcgacagtgcgaagaatttatatatgggggatgtgaaggaaatcagaatcgatttgaaagtctggaagagtgcaaaaaaatgtgtacaagagataatgcaaacaggattataaagacaacattgcaacaagaaaagccagatttctgctttttggaagaagatcctggaatatgtcgaggttatattaccaggtatttttataacaatcagacaaaacagtgtgaacgtttcaagtatggtggatgcctgggcaatatgaacaattttgagacactggaagaatgcaagaacatttgtgaagatggtccgaatggtttccaggtggataattatggaacccagctcaatgctgtgaataactccctgactccgcaatcaaccaaggttcccagcctttttgttacaaaagaaggaacaaatgatggttggaagaatgcggctcatatttaccaagtctttctgaacgccttctgcattcatgcatccatgttctttctaggattggatagcatttcatgcctatgttaatatttgtgcttttggcatttccttaatatttatatgtatacgtgatgcctttgatagcatactgctaataaagttttaatatttacatgcatagtaaaaaaaaaaaaaaaaaaaa

SEQ ID NO: 2279 - DNA, 6475 bp, Homo sapiens
ggcgaggcgaggtttgctggggtgaggcagcggcgcggccgggccgggccgggccacaggcggtggcggcgggaccatggaggcggcggtcgctgctccgcgtccccggctgctcctcctcgtgctggcggcggcggcggcggcggcggcggcgctgctcccgggggcgacggcgttacagtgtttctgccacctctgtacaaaagacaattttacttgtgtgacagatgggctctgctttgtctctgtcacagagaccacagacaaagttatacacaacagcatgtgtatagctgaaattgacttaattcctcgagataggccgtttgtatgtgcaccctcttcaaaaactgggtctgtgactacaacatattgctgcaatcaggaccattgcaataaaatagaacttccaactactgtaaagtcatcacctggccttggtcctgtggaactggcagctgtcattgctggaccagtgtgcttcgtctgcatctcactcatgttgatggtctatatctgccacaaccgcactgtcattcaccatcgagtgccaaatgaagaggacccttcattagatcgcccttttatttcagagggtactacgttgaaagacttaatttatgatatgacaacgtcaggttctggctcaggtttaccattgcttgttcagagaacaattgcgagaactattgtgttacaagaaagcattggcaaaggtcgatttggagaagtttggagaggaaagtggcggggagaagaagttgctgttaagatattctcctctagagaagaacgttcgtggttccgtgaggcagagatttatcaaactgtaatgttacgtcatgaaaacatcctgggatttatagcagcagacaataaagacaatggtacttggactcagctctggttggtgtcagattatcatgagcatggatccctttttgattacttaaacagatacacagttactgtggaaggaatgataaaacttgctctgtccacggcgagcggtcttgcccatcttcacatggagattgttggtacccaaggaaagccagccattgctcatagagatttgaaatcaaagaatatcttggtaaagaagaatggaacttgctgtattgcagacttaggactggcagtaagacatgattcagccacagataccattgatattgctccaaaccacagagtgggaacaaaaaggtacatggcccctgaagttctcgatgattccataaatatgaaacattttgaatccttcaaacgtgctgacatctatgcaatgggcttagtattctgggaaattgctcgacgatgttccattggtggaattcatgaagattaccaactgccttattatgatcttgtaccttctgacccatcagttgaagaaatgagaaaagttgtttgtgaacagaagttaaggccaaatatcccaaacagatggcagagctgtgaagccttgagagtaatggctaaaattatgagagaatgttggtatgccaatggagcagctaggcttacagcattgcggattaagaaaacattatcgcaactcagtcaacaggaaggcatcaaaatgtaattctacagctttgcctgaactctccttttttcttcagatctgctcctgggttttaatttgggaggtcaattgttctacctcactgagagggaacagaaggatattgcttccttttgcagcagtgtaataaagtcaattaaaaacttcccaggatttctttggacccaggaaacagccatgtgggtcctttctgtgcactatgaacgcttctttcccaggacagaaaatgtgtagtctacctttattttttattaacaaaacttgttttttaaaaagatgattgctggtcttaactttaggtaactctgctgtgctggagatcatctttaagggcaaaggagttggattgctgaattacaatgaaacatgtcttattactaaagaaagtgatttactcctggttagtacattctcagaggattctgaaccactagagtttccttgattcagactttgaatgtactgttctatagtttttcaggatcttaaaactaacacttataaaactcttatcttgagtctaaaaatgacctcatatagtagtgaggaacataattcatgcaattgtattttgtatactattattgttctttcacttattcagaacattacatgccttcaaaatgggattgtactataccagtaagtgccacttctgtgtctttctaatggaaatgagtagaattgctgaaagtctctatgttaaaacctatagtgtttgaattcaaaaagcttatttatctgggtaacccaaactttttctgttttgtttttggaagggtttttgtggtatgtcatttggtattctattctgaaaatgcctttctcctaccaaaatgtgcttaagccactaaagaaatgaagtggcattaattagtaaattattagcatggtcatgtttgaatattctcacatcaagcttttgcattttaattgtgttgtctaagtatacttttaaaaaatcaagtggcactctagatgcttatagtactttaatatttgtagcatacagactaatttttctaaaagggaaagtctgtctagctgcttgtgaaaagttatgtggtattctgtaagccatttttttctttatctgttcaaagacttattttttaagacatgaattacatttaaaattagaatatggttaatattaaataataggcctttttctaggaaggcgaaggtagttaataatttgaatagataacagatgtgcaagaaagtcacatttgttatgtatgtaggagtaaacgttcggtggatcctctgtctttgtaactgaggttagagctagtgtggttttgaggtctcactacactttgaggaaggcagcttttaattcagtgtttccttatgtgtgcgtacattgcaactgcttacatgtaatttatgtaatgcattcagtgcacccttgttacttgggagaggtggtagctaaagaacattctgagtataggtttttctccatttacagatgtctttggtcaaatattgaaagcaaacttgtcatggtcttcttacattaagttgaaactagcttataataactggtttttacttccaatgctatgaagtctctgcagggcttttacagttttcgaagtccttttatcactgtgatcttattctgaggggagaaaaaactatcatagctctgaggcaagacttcgactttatagtgctatcagttccccgatacagggtcagagtaacccatacagtattttggtcaggaagagaaagtggccatttacactgaatgagttgcattctgataatgtcttatctcttatacgtagaataaatttgaaagactatttgatcttaaaaccaaagtaattttagaatgagtgacatattacataggaatttagtgtcaatttcatgtgtttaaaaacatcatgggaaaaatgcttagaggttactattttgactacaaagttgagtttttttctgtagttaccataatttcattgaagcaaatgaatgagtttgagaggtttgtttttatagttgtgttgtattacttgtttaataataatctctaattctgtgatcaggtactttttttgtgggggttttttttttgtttttttttttttgttgttgtttttgggccatttctaagcctaccagatctgctttatgaaatccaggggaccaatgcattttatcactaaaactatttttatataattttaagaatataccaaaagttgtctgatttaaagttgtaatacatgatttctcactttcatgtaaggttatccacttttgctgaagatattttttattgaatcaaagattgagttacaattatacttttcttacctaagtggataaaatgtacttttgatgaatcagggaatttttttaaagttggagtttagttctaaattgactttacgtattactgcagttaattccttttttggctagggatggtttgataaaccacaattggctgatattgaaaatgaaagaaacttaaaaggtgggatggatcatgattactgtcgataactgcagataaatttgattagagtaataattttgtcatttaaaaacacagttgtttatactgcccatcctaggatgctcaccttccaagattcaacgtggctaaaacatcttctggtaaattgtgcgtccatattcattttgtcagtagccaggagaaatggggatgggggaaatacgacttagtgaggcatagacatccctggtccatcctttctgtctccagctgtttcttggaacctgctctcctgcttgctggtccctgacgcagagaccgttgcctcccccacagccgtttgactgaaggctgctctggagacctagagtaaaacggctgatggaagttgtgggacccacttccatttccttcagtcattagaggtggaagggaggggtctccaagtttggagattgagcagatgaggcttgggatgcccctgctttgacttcagccatggatgaggagtgggatggcagcaaggtggctcctgtggcagtggagttgtgccagaaacagtggccagttgtatcgcctataagacagggtaaggtctgaagagctgagcctgtaattctgctgtaataatgatagtgctcaagaagtgccttgagttggtgtacagtgccatggccatcaagaatcccagatttcaggttttattacaaaatgtaagtggtcacttggcgattttgtagtacatgcatgagttaccttttttctctatgtctgagaactgtcagattaaaacaagatggcaaagagatcgttagagtgcacaacaaaatcactatcccattagacacatcatcaaaagcttatttttattcttgcactggaagaatcgtaagtcaactgtttcttgaccatggcagtgttctggctccaaatggtagtgattccaaataatggttctgttaacactttggcagaaaatgccagctcagatattttgagatactaaggattatctttggacatgtactgcagcttcttgtctctgttttggattactggaatacccatgggccctctcaagagtgctggacttctaggacattaagatgattgtcagtacattaaacttttcaatcccattatgcaatcttgtttgtaaatgtaaacttctaaaaatatggttaataacattcaacctgtttattacaacttaaaaggaacttcagtgaatttgtttttattttttaacaagatttgtgaactgaatatcatgaaccatgttttgatacccctttttcacgttgtgccaacggaatagggtgtttgatatttcttcatatgttaaggagatgcttcaaaatgtcaattgctttaaacttaaattacctctcaagagaccaaggtacatttacctcattgtgtatataatgtttaatatttgtcagagcattctccaggtttgcagttttatttctataaagtatgggtattatgttgctcagttactcaaatggtactgtattgtttatatttgtaccccaaataacatcgtctgtactttctgttttctgtattgtatttgtgcaggattctttaggctttatcagtgtaatctctgccttttaagatatgtacagaaaatgtccatataaatttccattgaagtcgaatgatactgagaagcctgtaaagaggagaaaaaaacataagctgtgtttccccataagtttttttaaattgtatattgtatttgtagtaatattccaaaagaatgtaaataggaaatagaagagtgatgcttatgttaagtcctaacactacagtagaagaatggaagcagtgcaaataaattacatttttcccaagtgccagtggcatattttaaaataaagtgtatacgttggaatgagtcatgccatatgtagttgctgtagatggcaactagaacctttgagttacaagagtctttagaagttttctaaccctgcctagtgcaagttacaatattatagcgtgttcggggagtgccctcctgtctgcaggtgtgtctctgtgcctgggggcttttctccacatgcttaggggtgtgggtcttccattggggcatgatggacctgtctacaggtgatctctgttgcctttgggtcagcacatttgttagtctcctgggggtgaaaacttggcttacaagagaactggaaaaatgatgagatgtggtccccaaacccttgattgactctggggaggggctttgtgaataggattgctctcacattaaagatagttacttcaatttgaaggctggatttagggatttttttttttccttataacaaagacatcaccaggatatgaagcttttgttgaaagttggaaaaaaagtgaaattaaagacattcccagacaaa

SEQ ID NO: 2280 - DNA, 4629 bp, Homo sapiens
ggagagggagaaggctctcgggcggagagaggtcctgcccagctgttggcgaggagtttcctgtttcccccgcagcgctgagttgaagttgagtgagtcactcgcgcgcacggagcgacgacacccccgcgcgtgcacccgctcgggacaggagccggactcctgtgcagcttccctcggccgccgggggcctccccgcgcctcgccggcctccaggccccctcctggctggcgagcgggcgccacatctggcccgcacatctgcgctgccggcccggcgcggggtccggagagggcgcggcgcggaggcgcagccaggggtccgggaaggcgccgtccgctgcgctgggggctcggtctatgacgagcagcggggtctgccatgggtcgggggctgctcaggggcctgtggccgctgcacatcgtcctgtggacgcgtatcgccagcacgatcccaccgcacgttcagaagtcggttaataacgacatgatagtcactgacaacaacggtgcagtcaagtttccacaactgtgtaaattttgtgatgtgagattttccacctgtgacaaccagaaatcctgcatgagcaactgcagcatcacctccatctgtgagaagccacaggaagtctgtgtggctgtatggagaaagaatgacgagaacataacactagagacagtttgccatgaccccaagctcccctaccatgactttattctggaagatgctgcttctccaaagtgcattatgaaggaaaaaaaaaagcctggtgagactttcttcatgtgttcctgtagctctgatgagtgcaatgacaacatcatcttctcagaagaatataacaccagcaatcctgacttgttgctagtcatatttcaagtgacaggcatcagcctcctgccaccactgggagttgccatatctgtcatcatcatcttctactgctaccgcgttaaccggcagcagaagctgagttcaacctgggaaaccggcaagacgcggaagctcatggagttcagcgagcactgtgccatcatcctggaagatgaccgctctgacatcagctccacgtgtgccaacaacatcaaccacaacacagagctgctgcccattgagctggacaccctggtggggaaaggtcgctttgctgaggtctataaggccaagctgaagcagaacacttcagagcagtttgagacagtggcagtcaagatctttccctatgaggagtatgcctcttggaagacagagaaggacatcttctcagacatcaatctgaagcatgagaacatactccagttcctgacggctgaggagcggaagacggagttggggaaacaatactggctgatcaccgccttccacgccaagggcaacctacaggagtacctgacgcggcatgtcatcagctgggaggacctgcgcaagctgggcagctccctcgcccgggggattgctcacctccacagtgatcacactccatgtgggaggcccaagatgcccatcgtgcacagggacctcaagagctccaatatcctcgtgaagaacgacctaacctgctgcctgtgtgactttgggctttccctgcgtctggaccctactctgtctgtggatgacctggctaacagtgggcaggtgggaactgcaagatacatggctccagaagtcctagaatccaggatgaatttggagaatgttgagtccttcaagcagaccgatgtctactccatggctctggtgctctgggaaatgacatctcgctgtaatgcagtgggagaagtaaaagattatgagcctccatttggttccaaggtgcgggagcacccctgtgtcgaaagcatgaaggacaacgtgttgagagatcgagggcgaccagaaattcccagcttctggctcaaccaccagggcatccagatggtgtgtgagacgttgactgagtgctgggaccacgacccagaggcccgtctcacagcccagtgtgtggcagaacgcttcagtgagctggagcatctggacaggctctcggggaggagctgctcggaggagaagattcctgaagacggctccctaaacactaccaaatagctcttctggggcaggctgggccatgtccaaagaggctgcccctctcaccaaagaacagaggcagcaggaagctgcccctgaactgatgcttcctggaaaaccaagggggtcactcccctccctgtaagctgtggggataagcagaaacaacagcagcagggagtgggtgacatagagcattctatgcctttgacattgtcataggataagctgtgttagcacttcctcaggaaatgagattgatttttacaatagccaataacatttgcactttattaatgcctgtatataaatatgaatagctatgttttatatatatatatatatatctatatatgtctatagctctatatatatagccataccttgaaaagagacaaggaaaaacatcaaatattcccaggaaattggttttattggagaactccagaaccaagcagagaaggaagggacccatgacagcattagcatttgacaatcacacatgcagtggttctctgactgtaaaacagtgaactttgcatgaggaaagaggctccatgtctcacagccagctatgaccacattgcacttgcttttgcaaaataatcattccctgcctagcacttctcttctggccatggaactaagtacagtggcactgtttgaggaccagtgttcccggggttcctgtgtgcccttatttctcctggacttttcatttaagctccaagccccaaatctggggggctagtttagaaactctccctcaacctagtttagaaactctaccccatctttaataccttgaatgttttgaaccccactttttaccttcatgggttgcagaaaaatcagaacagatgtccccatccatgcgattgccccaccatctactaatgaaaaattgttctttttttcatctttcccctgcacttatgttactattctctgctcccagccttcatccttttctaaaaaggagcaaattctcactctaggctttatcgtgtttactttttcattacacttgacttgattttctagttttctatacaaacaccaatgggttccatctttctgggctcctgattgctcaagcacagtttggcctgatgaagaggatttcaactacacaatactatcattgtcaggactatgacctcaggcactctaaacatatgttttgtttggtcagcacagcgtttcaaaaagtgaagccactttataaatatttggagattttgcaggaaaatctggatccccaggtaaggatagcagatggttttcagttatctccagtccacgttcacaaaatgtgaaggtgtggagacacttacaaagctgcctcacttctcactgtaaacattagctctttccactgcctacctggaccccagtctaggaattaaatctgcacctaaccaaggtcccttgtaagaaatgtccattcaagcagtcattctctgggtatataatatgattttgactaccttatctggtgttaagatttgaagttggccttttattggactaaaggggaactcctttaagggtctcagttagcccaagtttcttttgcttatatgttaatagttttaccctctgcattggagagaggagtgctttactccaagaagctttcctcatggttaccgttctctccatcatgccagccttctcaacctttgcagaaattactagagaggatttgaatgtgggacacaaaggtcccatttgcagttagaaaatttgtgtccacaaggacaagaacaaagtatgagctttaaaactccataggaaacttgttaatcaacaaagaagtgttaatgctgcaagtaatctcttttttaaaactttttgaagctacttattttcagccaaataggaatattagagagggactggtagtgagaatatcagctctgtttggatggtggaaggtctcattttattgagatttttaagatacatgcaaaggtttggaaatagaacctctaggcaccctcctcagtgtgggtgggctgagagttaaagacagtgtggctgcagtagcatagaggcgcctagaaattccacttgcaccgtagggcatgctgataccatcccaatagctgttgcccattgacctctagtggtgagtttctagaatactggtccattcatgagatattcaagattcaagagtattctcacttctgggttatcagcataaactggaatgtagtgtcagaggatactgtggcttgttttgtttatgtttttttttcttattcaagaaaaaagaccaaggaataacattctgtagttcctaaaaatactgacttttttcactactatacataaagggaaagttttattcttttatggaacacttcagctgtactcatgtattaaaataggaatgtgaatgctatatactctttttatatcaaaagtctcaagcacttatttttattctatgcattgtttgtcttttacataaataaaatgtttattagattgaataaagcaaaatactcaggtgagcatcctgcctcctgttcccattcctagtagctaaa

SEQ ID NO: 2281 - DNA, 4704 bp, Homo sapiens
ggagagggagaaggctctcgggcggagagaggtcctgcccagctgttggcgaggagtttcctgtttcccccgcagcgctgagttgaagttgagtgagtcactcgcgcgcacggagcgacgacacccccgcgcgtgcacccgctcgggacaggagccggactcctgtgcagcttccctcggccgccgggggcctccccgcgcctcgccggcctccaggccccctcctggctggcgagcgggcgccacatctggcccgcacatctgcgctgccggcccggcgcggggtccggagagggcgcggcgcggaggcgcagccaggggtccgggaaggcgccgtccgctgcgctgggggctcggtctatgacgagcagcggggtctgccatgggtcgggggctgctcaggggcctgtggccgctgcacatcgtcctgtggacgcgtatcgccagcacgatcccaccgcacgttcagaagtcggatgtggaaatggaggcccagaaagatgaaatcatctgccccagctgtaataggactgcccatccactgagacatattaataacgacatgatagtcactgacaacaacggtgcagtcaagtttccacaactgtgtaaattttgtgatgtgagattttccacctgtgacaaccagaaatcctgcatgagcaactgcagcatcacctccatctgtgagaagccacaggaagtctgtgtggctgtatggagaaagaatgacgagaacataacactagagacagtttgccatgaccccaagctcccctaccatgactttattctggaagatgctgcttctccaaagtgcattatgaaggaaaaaaaaaagcctggtgagactttcttcatgtgttcctgtagctctgatgagtgcaatgacaacatcatcttctcagaagaatataacaccagcaatcctgacttgttgctagtcatatttcaagtgacaggcatcagcctcctgccaccactgggagttgccatatctgtcatcatcatcttctactgctaccgcgttaaccggcagcagaagctgagttcaacctgggaaaccggcaagacgcggaagctcatggagttcagcgagcactgtgccatcatcctggaagatgaccgctctgacatcagctccacgtgtgccaacaacatcaaccacaacacagagctgctgcccattgagctggacaccctggtggggaaaggtcgctttgctgaggtctataaggccaagctgaagcagaacacttcagagcagtttgagacagtggcagtcaagatctttccctatgaggagtatgcctcttggaagacagagaaggacatcttctcagacatcaatctgaagcatgagaacatactccagttcctgacggctgaggagcggaagacggagttggggaaacaatactggctgatcaccgccttccacgccaagggcaacctacaggagtacctgacgcggcatgtcatcagctgggaggacctgcgcaagctgggcagctccctcgcccgggggattgctcacctccacagtgatcacactccatgtgggaggcccaagatgcccatcgtgcacagggacctcaagagctccaatatcctcgtgaagaacgacctaacctgctgcctgtgtgactttgggctttccctgcgtctggaccctactctgtctgtggatgacctggctaacagtgggcaggtgggaactgcaagatacatggctccagaagtcctagaatccaggatgaatttggagaatgttgagtccttcaagcagaccgatgtctactccatggctctggtgctctgggaaatgacatctcgctgtaatgcagtgggagaagtaaaagattatgagcctccatttggttccaaggtgcgggagcacccctgtgtcgaaagcatgaaggacaacgtgttgagagatcgagggcgaccagaaattcccagcttctggctcaaccaccagggcatccagatggtgtgtgagacgttgactgagtgctgggaccacgacccagaggcccgtctcacagcccagtgtgtggcagaacgcttcagtgagctggagcatctggacaggctctcggggaggagctgctcggaggagaagattcctgaagacggctccctaaacactaccaaatagctcttctggggcaggctgggccatgtccaaagaggctgcccctctcaccaaagaacagaggcagcaggaagctgcccctgaactgatgcttcctggaaaaccaagggggtcactcccctccctgtaagctgtggggataagcagaaacaacagcagcagggagtgggtgacatagagcattctatgcctttgacattgtcataggataagctgtgttagcacttcctcaggaaatgagattgatttttacaatagccaataacatttgcactttattaatgcctgtatataaatatgaatagctatgttttatatatatatatatatatctatatatgtctatagctctatatatatagccataccttgaaaagagacaaggaaaaacatcaaatattcccaggaaattggttttattggagaactccagaaccaagcagagaaggaagggacccatgacagcattagcatttgacaatcacacatgcagtggttctctgactgtaaaacagtgaactttgcatgaggaaagaggctccatgtctcacagccagctatgaccacattgcacttgcttttgcaaaataatcattccctgcctagcacttctcttctggccatggaactaagtacagtggcactgtttgaggaccagtgttcccggggttcctgtgtgcccttatttctcctggacttttcatttaagctccaagccccaaatctggggggctagtttagaaactctccctcaacctagtttagaaactctaccccatctttaataccttgaatgttttgaaccccactttttaccttcatgggttgcagaaaaatcagaacagatgtccccatccatgcgattgccccaccatctactaatgaaaaattgttctttttttcatctttcccctgcacttatgttactattctctgctcccagccttcatccttttctaaaaaggagcaaattctcactctaggctttatcgtgtttactttttcattacacttgacttgattttctagttttctatacaaacaccaatgggttccatctttctgggctcctgattgctcaagcacagtttggcctgatgaagaggatttcaactacacaatactatcattgtcaggactatgacctcaggcactctaaacatatgttttgtttggtcagcacagcgtttcaaaaagtgaagccactttataaatatttggagattttgcaggaaaatctggatccccaggtaaggatagcagatggttttcagttatctccagtccacgttcacaaaatgtgaaggtgtggagacacttacaaagctgcctcacttctcactgtaaacattagctctttccactgcctacctggaccccagtctaggaattaaatctgcacctaaccaaggtcccttgtaagaaatgtccattcaagcagtcattctctgggtatataatatgattttgactaccttatctggtgttaagatttgaagttggccttttattggactaaaggggaactcctttaagggtctcagttagcccaagtttcttttgcttatatgttaatagttttaccctctgcattggagagaggagtgctttactccaagaagctttcctcatggttaccgttctctccatcatgccagccttctcaacctttgcagaaattactagagaggatttgaatgtgggacacaaaggtcccatttgcagttagaaaatttgtgtccacaaggacaagaacaaagtatgagctttaaaactccataggaaacttgttaatcaacaaagaagtgttaatgctgcaagtaatctcttttttaaaactttttgaagctacttattttcagccaaataggaatattagagagggactggtagtgagaatatcagctctgtttggatggtggaaggtctcattttattgagatttttaagatacatgcaaaggtttggaaatagaacctctaggcaccctcctcagtgtgggtgggctgagagttaaagacagtgtggctgcagtagcatagaggcgcctagaaattccacttgcaccgtagggcatgctgataccatcccaatagctgttgcccattgacctctagtggtgagtttctagaatactggtccattcatgagatattcaagattcaagagtattctcacttctgggttatcagcataaactggaatgtagtgtcagaggatactgtggcttgttttgtttatgtttttttttcttattcaagaaaaaagaccaaggaataacattctgtagttcctaaaaatactgacttttttcactactatacataaagggaaagttttattcttttatggaacacttcagctgtactcatgtattaaaataggaatgtgaatgctatatactctttttatatcaaaagtctcaagcacttatttttattctatgcattgtttgtcttttacataaataaaatgtttattagattgaataaagcaaaatactcaggtgagcatcctgcctcctgttcccattcctagtagctaaa

SEQ ID NO: 2282 - DNA, 4199 bp, Homo sapiens
ggagggcagtcggcggctctcgcgccccggccactttccctgcgcgattcccggagctccctgcaggaggtgagagtccccagcgggtccggatggcgtagttttgccgcggcgcagcagctgccggagctcgccgccgccgagcgctgggcggggaaacttgccgccgctttcctccaacttgctgcgggtggatctccgctggacacaccgcctccgaggcagtttgaaaattgcaaggagggactttaagactacttctgatttgcaaagattgtctgtgctctgagcaggctgaagtgactggacgagacgcactgttggagaaataaaaatgacttcccattatgtgattgccatctttgccctgatgagctcctgtttagccactgcaggtccagagcctggtgcactgtgtgaactgtcacctgtcagtgcctcccatcctgtccaggccttgatggagagcttcactgttttgtcaggctgtgccagcagaggcacaactgggctgccacaggaggtgcatgtcctgaatctccgcactgcgggccaggggcctggccagctacagagagaggtcacacttcacctgaatcccatctcctcagtccacatccaccacaagtctgttgtgttcctgctcaactccccacaccccctggtgtggcatctgaagacagagagacttgccactggggtctccagactgtttttggtgtctgagggttctgtggtccagttttcatcagcaaacttctccttgacagcagaaacagaagaaaggaacttcccccatggaaatgaacatctgttaaattgggcccgaaaagagtatggagcagttacttcattcaccgaactcaagatagcaagaaacatttatattaaagtgggggaagatcaagtgttccctccaaagtgcaacatagggaagaattttctctcactcaattaccttgctgagtaccttcaacccaaagcagcagaagggtgtgtgatgtccagccagccccagaatgaggaagtacacatcatcgagctaatcacccccaactctaacccctacagtgctttccaggtggatataacaattgatataagaccttctcaagaggatcttgaagtggtcaaaaatctcatcctgatcttgaagtgcaaaaagtctgtcaactgggtgatcaaatcttttgatgttaagggaagcctgaaaattattgctcctaacagtattggctttggaaaagagagtgaaagatctatgacaatgaccaaatcaataagagatgacattccttcaacccaagggaatctggtgaagtgggctttggacaatggctatagtccaataacttcatacacaatggctcctgtggctaatagatttcatcttcggcttgaaaataatgcagaggagatgggagatgaggaagtccacactattcctcctgagctacggatcctgctggaccctggtgccctgcctgccctgcagaacccgcccatccggggaggggaaggccaaaatggaggccttccgtttcctttcccagatatttccaggagagtctggaatgaagagggagaagatgggctccctcggccaaaggaccctgtcattcccagcatacaactgtttcctggtctcagagagccagaagaggtgcaagggagcgtggatattgccctgtctgtcaaatgtgacaatgagaagatgatcgtggctgtagaaaaagattcttttcaggccagtggctactcggggatggacgtcaccctgttggatcctacctgcaaggccaagatgaatggcacacactttgttttggagtctcctctgaatggctgcggtactcggccccggtggtcagcccttgatggtgtggtctactataactccattgtgatacaggttccagcccttggggacagtagtggttggccagatggttatgaagatctggagtcaggtgataatggatttccgggagatatggatgaaggagatgcttccctgttcacccgacctgaaatcgtggtgtttaattgcagccttcagcaggtgaggaaccccagcagcttccaggaacagccccacggaaacatcaccttcaacatggagctatacaacactgacctctttttggtgccctcccagggcgtcttctctgtgccagagaatggacacgtttatgttgaggtatctgttactaaggctgaacaagaactgggatttgccatccaaacgtgctttatctctccatattcgaaccctgataggatgtctcattacaccattattgagaatatttgtcctaaagatgaatctgtgaaattctacagtcccaagagagtgcacttccctatcccgcaagctgacatggataagaagcgattcagctttgtcttcaagcctgtcttcaacacctcactgctctttctacagtgtgagctgacgctgtgtacgaagatggagaagcacccccagaagttgcctaagtgtgtgcctcctgacgaagcctgcacctcgctggacgcctcgataatctgggccatgatgcagaataagaagacgttcaccaagccccttgctgtgatccaccatgaagcagaatctaaagaaaaaggtccaagcatgaaggaaccaaatccaatttctccaccaattttccatggtctggacaccctaaccgtgatgggcattgcgtttgcagcctttgtgatcggagcactcctgacgggggccttgtggtacatctattctcacacaggggagacagcaggaaggcagcaagtccccacctccccgccagcctcggaaaacagcagtgctgcccacagcatcggcagcacgcagagcacgccttgctccagcagcagcacggcctagcccaacccagcccaacccggcccaacccagcccagcccagctcagctcagctactgccaagggcaggaccaatggctgagcctcgtgtccagactcagagggctggattttggttcccttgtaaagacagagtgaatttcagtataaagatcacccgttgtattcaccccacacccagggctagtataaacatgaccctgggcttctgtaccacactagaattcatgtgagaaagctaaaatggtggtcttctccaccagcccctcacaggcttgggggttttcaatgtgaaacacatgccagtttttaaaatgctgctttgtccaggtgagaacatccataatttggggccctgagttttacccagactcaaggagttggtaaagggttaatagccagatagtagaaccagtgaggagatgcggccaaagattctttatatctgaaccaagatgtaaaacaagaaatgctttgaggctttctaagcgatcctcctgtctaatttgcacctttgtctggatgcacacttctgaccttgctgccacaacctgtggggtctgatgtgtcccttgatgggtgctgccctcagggactgcaccctgacaagtgttaaggcaacattcctttcttgtgccctgggccaaaaccaatgctgatgaccttatcagcttcctgtttcttcccatacttgcatacaccactgcaaaatgtcttaatgcaaattttgtatttcttacaggcctacagaaattgaaaatgaccaaaatcaggaaccacagatttgtgcccattcctaatattttgttctgcaaattaatgtataatttgaggtgaaattcagttataaagtcaaggacgaatttgcacagtgatatatttctatgtgtatgcaagtacaagtatataatatgtcacctggcacattcattttctcagttgaagaagagaaaatttgaaaatgtccttatgcttttagagttgcaacttaagtatatttggtagggtgagtgtttccactcaaaatatgtcaacttaaaaaaaaataggccctttcataaaaaccaaactgtagcaagatgcaaatgcatggcaaatcctgtcggtctccagttggttatctgaatagtgtcaccaattccaccaagacagtgctgagattggaaaagggcactcatttggattgccttacttctcttgccttaaatatatcccatatatttaatatgtcaaaaagggcttgaggtgaatttcattaaatggaataatatgatgccactttgcagctaaaataagctcagtgatacctcct

SEQ ID NO: 2283 - DNA, 2399 bp, Homo sapiens
ggaggaggaggaggaggagaggagcagtcagcaggcccgaggaggcaggacttcctggtgtgggggttgtcaacagcccagaaagagaaagacggagaggcagagacccaggggagccgaggagcggagacacggacccagcagggtcacgcgggaggagactcgggacacccactcgctggctgccaccgggagcagaggggggctcggccgccccctcccacatcagtctccagacccttggggcttcagaggccgctcctaggctcctcggaggaggcgcgggttccttcttttccggagagcaaactttcctcggagatgcctggcaggatgagccgcggcccccggagaggacgggacagcctctgatcgccgcctgcgtgccccgccactgcccatggccaggaggccccagggaacggacagcccgacctcttaggcgccgggaccctcaggctcagatcagtggccgaggccccagagtttgcaaactcagctctggagttcagcagcaacagcagcaggaaaaacctgcccctgctcccccctcccgccacctcccctctcctcttctcccctcacccagcaggcacccccggttcccgccaggccctcctgccatgtcggacccagacgtccccaggggctcggatgtccccgccatgtggcccccttgttccaggggtgcctgagccccttcaaggagccccaacccacccccaaccttggcccagccctgagccccagggaccatgagcgggggcaagaagaagagtagtttccaaatcaccagcgtcaccacggactatgagggccctgggagcccaggggcttcggatccccctaccccacagcccccaaccgggcccccgccccgcctgcccaatggggagcccagccccgatccggggggcaagggcaccccccggaatggctccccaccacctggggccccttcctcccgtttccgggtggtgaagctgccccacggcctgggagagccttatcgccgcggtcgctggacgtgtgtggatgtttatgagcgagacctggagccccacagcttcggcggactcctggagggaattcgaggggcctcagggggcgccgggggcagatctttggattccaggttggagctggccagcctcggcctgggcgcccccaccccaccgtcaggcctgtctcagggccccacctcctggctccgtccaccccccacctctcctggacctcaggcccgctccttcactgggggactgggccagctggtggtgcccagcaaagccaaggcagagaaacccccactgtcggcctcctcaccccagcagcgccccccagagcctgagaccggtgagagtgcgggcacatcccgggctgccacgcccctgccctctctgagggtggaagcggaggctgggggctcaggggccaggacccctccactgtcccggaggaaagctgtagacatgcggctgcggatggagttgggtgctccagaagagatggggcaggtgcccccacttgactctcgccccagctccccggccctctacttcacccacgatgccagcctggttcacaaatctccagaccccttcggagcagtagcagctcagaagttcagcctggcccactccatgttggccatcagtggtcacctagacagcgacgatgatagtggctccggaagcctggttggcattgacaacaaaatcgagcaagccatggacttggtgaagtcccacctcatgtttgcggtccgggaggaggtggaggtgctgaaggagcagatccgggaactggcggagcggaacgctgcgctggagcaggagaatgggctgctgcgcgccctggccagcccggagcagctggctcagctgccctcctcgggggtcccacggcttgggccccctgcgcccaatgggccctccgtctgagcctcccttcccttacaatgtgcctttggggctgcccggccttgcgtcagccgcctgccccctcttcctatgcagctttaatgtccccgtgtccccggggtgggagttcaaggctcagtaatggcctggtcccccggcccctgccccatctcctcatcatccccagccttgatggaggagggagggcttcaggacggggcgtcagagggagccccctctgggagggaaccaacccccaccctccctcctgggaccccccagcagtagacggcttgggggagtcggaggctccccggcagacaccccacccccatcttgttcccttgaggtgcctcctctcctctgcccaggggagggagtgtggacagtatctggaagttctgggattcaggttgttattaaaataataataataattaaaaactctgaagaaacttgaaaaaaaaaaaaaaaaaa

SEQ ID NO: 2284 - DNA, 1842 bp, Homo sapiens
tttagaaggttagtgttggttcttttattcgattaaacaggaatacacatatatctaccaaagaataggtaagggagaaataagaacactaaaaaaactcggaatcgttaagtgtgaagcatatttggagttaaaagaaccaaatattactaagtaagcagacgcgggcacgcgctgcataccgggatttgtagtcccttccggggcggggtacagcgcgcctgcgcagaggggccgtcgctcttccgggcgcatgcgtgcggcagcggcgccaggactgactgcgccgtggaggctgctgcagtgttgtgagttggaagctggggagctcggcatggcggtccccgctgcagccatggggccctcggcgttgggccagagcggccccggctcgatggccccgtggtgctcagtgagcagcggcccgtcgcgctacgtgcttgggatgcaggagctgttccggggccacagcaagacgcgcgagttcctggcgcacagcgccaaggtgcactcggtggcctggagttgcgacgggcgtcgcctagcctcggggtccttcgacaagacggccagcgtcttcttgctggagaaggaccggttggtcaaagaaaacaattatcggggacatggggatagtgtggaccagctttgttggcatccaagtaatcctgacctatttgttacggcgtccggagataaaaccattcgcatctgggatgtgaggactacaaaatgcattgccactgtgaacactaaaggggagaacattaatatctgctggagtcctgatgggcagaccattgctgtaggcaacaaggatgatgtggtgacctttattgatgccaagacacaccgttccaaagcagaagagcagttcaagttcgaggtcaacgaaatctcctggaacaatgacaataatatgttcttcctgacaaatggcaatggttgtatcaacatcctcagctacccagaactgaagcctgtgcagtccatcaacgcccatccttccaactgcatctgtatcaagtttgaccccatggggaagtactttgccacaggaagtgcagatgctttggtcagcctctgggatgtggatgagttagtgtgtgttcggtgcttttccaggctggattggcctgtaagaaccctcagtttcagccatgatgggaaaatgctggcgtcagcatcggaagatcattttattgacattgctgaagtggagacaggggacaaactatgggaggtacagtgtgagtctccgaccttcacagtggcgtggcaccccaaaaggcctctgctggcatttgcctgtgatgacaaagacggcaaatatgacagcagccgggaagccggaactgtgaagctgtttgggcttcctaatgattcttgagaggaggttgtagggagaggaggccccggcagaggtcttccttcatgtggttagtttggtctgttctctcggagttggtgggcaccctaaatatttgtaagttggtataaattgtaaacgtctctggtcaggctgcgcatttcattcttttgctttgtctgtgtattagctctttccattctttgcccccagcatgagttaactcgcgtggactctgcagtgcgagtagtgaccccaccataccttgtcctctggacctcctgtcttctctgcttctgggtgcatggtagactttgtggcatttgatacaacttggacaatacctagtttggagggaggggaatggaagggcatggaagtttttttaaataattaaaaatatatatatataattttgagaattgagcatttaataaactgacttttgttattatggaaaaaaaaaaaaaaaa

SEQ ID NO: 2285 - DNA, 9546 bp, Homo sapiens
cccccccgccagcccgggcccgctgcccccggcgcggcgtcgccgcggcgcctcccgcctgcccgccggccctcgcgccctcccccggcggcggcggcggcccggccgccccgcgctccccggcgaggcgccgccgcccggcccggcctcgcctcggacgcctcgctccgacatgccccgctctggcggccgggctcgcggaggatcatgactgcggcagcgaactgggtggcgaacggggcgagcctggaggattgtcactccaacctcttttcgctggctgaactcacgggaatcaaatggcgtaggtacaattttggagggcatggggactgtggacccataatttcagccccagcccaagatgatccaattctgttaagtttcatccgctgtctgcaagctaacctgctttgtgtatggcgtcgtgatgtcaaaccagattgcaaagagttatggatattctggtggggagatgaacccaacctagtgggtgtaatacatcatgaactgcaggttgtggaagaaggactctgggaaaatggcctttcctatgaatgtaggacgctgctcttcaaagcgatccacaatctgttagaaaggtgcctaatggataagaacttcgttaggattgggaaatggtttgtccgaccctacgaaaaggatgaaaagccagtcaacaaaagtgagcatttgtcctgtgctttcacattctttctgcatggagaaagtaatgtatgcacaagtgtggagattgcccagcaccagccaatttatttgatcaatgaggagcatatacacatggctcagtcttcacctgcaccatttcaagtactggtaagtccttatggcttaaatgggacgctaacaggccaagcatacaagatgtcagacccagccactcgtaagttgattgaggaatggcagtatttctacccgatggtgctaaaaaagaaagaagaatcgaaagaggaagacgagttgggatatgatgatgatttccctgtggcagttgaagtaattgttggtggtgttcggatggtttacccttcagcatttgttttgatctctcagaatgacatcccggttcctcagagtgttgccagtgctggaggccacattgcagttgggcagcaagggcttggtagtgtgaaggacccaagtaactgtgggatgcctctgacccctcccacctctccagaacaggctatcctaggtgagagtggaggtatgcagagtgctgccagtcacctggtttcccaagatggagggatgataacgatgcacagtccaaagagatcggggaagattcctccaaaactccacaatcatatggtccatcgagtctggaaggaatgcatcctcaacagaacccagtccaagaggagccaaatgtcaactccaactcttgaagaagagcctgctagcaatcctgctacttgggattttgtggatccaacccaaagagtcagctgttcttgttccaggcataagcttttaaaacgttgtgcagtcgggcccaatcgacctcccacagtatctcaaccagggttcagtgcaggaccatcatcatcttcatctttaccacctcctgcttcttctaagcacaaaacagcagaaagacaggaaaaaggagacaagctgcaaaagagacccttaataccatttcaccataggccctctgtggccgaagaattatgcatggagcaagatacaccaggacagaaactagggttggcagggatagactcctccttagaggtgtctagcagtaggaaatatgataagcaaatggccgtgccttccagaaatacaagcaagcaaatgaatctgaatcctatggattcacctcattcccctatatcccctctgccaccaacactcagccctcagccacgaggtcaggaaacagagagtttggacccaccatcggtccctgtgaatccagccctttatggaaatggactagaactccagcagttgtctactctggatgacagaactgtcctcgtaggccaaagactgcctctcatggcagaggtcagcgagacagccttatattgtgggattaggccctcgaacccggagtcatcagaaaagtggtggcatagttatcgtctcccacccagtgatgatgctgagttcaggcctccagagctccagggtgagagatgtgatgccaaaatggaggtaaactcagagagcactgcattgcaaagactcttagcacaacctaacaaacggtttaaaatctggcaagacaaacagccccagttgcagccactccacttccttgacccattgcctctatcacaacaacctggagacagtttgggagaagtgaatgacccatatacctttgaagatggtgacataaaatacatctttacagccaacaagaaatgcaaacaagggacggagaaagattccctgaaaaagaataagtcagaggatggatttggtaccaaggatgtcactacaccaggtcattccacgccggtgcctgatgggaaaaatgccatgtctattttcagttctgctactaaaacagatgtccggcaggataatgctgctggcagagctggctccagtagccttacacaggtaacagatttggcaccttccctgcatgacttagacaacatctttgataattctgatgacgacgaacttggggctgtatcacctgctctgcgctcatcaaaaatgcctgcagttgggacagaagaccgacctcttgggaaggatggaagagctgctgttccttatccaccaacagttgcagacttgcaaaggatgtttcccactccaccatctttggaacagcatcctgcattttctcctgtgatgaattataaagatgggatcagctcagagacagtgacagcattaggcatgatggagagccctatggtcagtatggtttcaacacaactcacagaattcaaaatggaagtggaagatggattaggaagtcccaagcccgaggaaattaaggacttttcatatgtgcacaaagttccatcctttcaaccttttgtgggatcctccatgtttgctccactgaagatgttgccgagccattgtttgctacctctgaagatacctgatgcctgtctgtttcggccttcatgggcaattcctcctaaaattgaacaactgcccatgccccctgcagccactttcattagagatggctacaataacgtgcctagtgttgggagcctagcagatccagactatctgaacacaccacagatgaacacacccgtgacgttgaacagcgctgccccagccagcaatagtggggcaggagtcctaccatctccagcaacccctcgcttctctgtccccacaccacgaacccccaggaccccaagaactcccagaggtgggggcactgccagtggtcaagggtctgttaagtatgatagcaccgatcaaggatcaccagcctccaccccctctactacacggcccctcaactctgtggagcccgccaccatgcagccaattcccgaagcccacagcctctatgttaccctgattctctccgattccgtgatgaatatctttaaagacagaaactttgacagctgttgcatctgtgcctgcaacatgaacatcaaaggggcggatgtcgggctttacatccccgattcttccaatgaggaccagtaccgctgtacctgtgggtttagtgcgattatgaaccgcaaacttggctacaattcaggactcttccttgaagatgagttggatatttttgggaagaattctgatattggtcaggctgcagagaggcgcttaatgatgtgtcagtccaccttccttcctcaggtggaaggaaccaaaaaaccccaggagccacccataagccttctcctcctcctccagaatcaacacacacaaccttttgcttcactgaatttcctggactacatttcctctaacaatcgccaaactcttccctgtgtaagctggagttatgaccgggtgcaagcagataataatgattactggacggaatgctttaatgcgttggagcaggggcggcagtatgtggataaccccactggtggaaaagtggacgaagctctggtgagaagtgccactgtgcactcttggcctcacagcaatgtgctggacatcagcatgctctcctcccaggatgtggttcgtatgctgttgtccctgcagccctttctccaagatgccatccaaaagaagcgcacgggcaggacctgggagaacatccagcatgtgcagggaccactcacttggcagcagttccataaaatggcaggacggggaacctacggttcggaagaatctcctgagccgttgcccatccccactctgctggtaggctatgacaaggatttcctcaccatctcgccattctccttgccgttttgggagaggctcttgttggacccatatgggggccaccgtgatgttgcctatattgtggtgtgtccagaaaatgaggccttgctcgaaggagccaaaactttcttcagggacttgagtgctgtatacgagatgtgtaggcttgggcagcacaagcccatctgcaaagtgctacgtgacgggatcatgcgcgtgggaaaaactgtggcacagaagctgacagatgagcttgtgagtgagtggtttaaccagccttggagcggcgaggagaatgacaatcattccagactcaaactttatgcgcaagtttgccgccatcacctagcaccttatttagccactctgcagcttgatagcagcctattgataccacctaaataccagaccccaccagcagcagcacagggacaagctacgccagggaatgctgggcccttagctccaaatggatcagcagctcccccagctggcagtgcatttaatcccacctcgaatagtagttctacaaatcctgcagcaagtagttctgcatctggttcctctgtgccaccggtctcatcgtctgcctctgctcctggtattagccagataagcactacctcttcttcaggattcagtggtagtgttggagggcagaaccccagcactgggggcatttctgcggatagaacgcaagggaacataggctgtggtggagacactgaccctgggcagagctcttctcagccctcacaggatggacaagagagtgttacagaaagggagagaataggaattcccacggagcctgactctgcagacagccatgcccaccctccagctgttgtcatttacatggtggacccgttcacgtatgctgcagaggaggactccacttctgggaacttttggctgttgagcttgatgcgctgctacacagaaatgctggataatttacctgagcatatgagaaattctttcattctccagattgtgccttgccagtacatgctgcagacaatgaaggatgagcaagttttctacattcaatacttgaagtccatggcattttcagtgtactgccagtgcaggcgaccactgcctacacagatccacattaaatccctcacgggatttgggcctgcagccagcattgagatgaccctcaagaaccctgagcggcccagcccaatccagctttactcccctccctttatattggccccaatcaaagacaagcagacagagctgggagagacgtttggtgaggcgagccagaaatacaatgtgctcttcgtgggctattgtctgtctcacgaccagcgctggcttttggcttcctgcactgacctccatggggaattattagagacctgcgttgtaaatattgctttaccaaacaggtcacggaggagtaaagtatctgcacgtaaaattggactacagaagttatgggagtggtgcatagggattgtccaaatgacatctctaccctggagagttgtaatcgggcgacttgggcgtcttggccatggggagcttaaagattggagtatcctccttggagaatgttcactacagacaatcagcaaaaagctcaaggatgtgtgccggatgtgtggaatctctgccgcagactctccttctatccttagtgcctgcctggttgccatggagccccaggggtcctttgtagtgatgccagatgctgtcacaatgggctctgtttttggccgaagtactgcactgaacatgcagtcatctcagctcaacacccctcaagatgcttcttgtacacacatcttggtgttcccaacatcatcaaccatccaggtggctccagccaactaccccaatgaagatgggtttagccccaacaatgatgatatgtttgttgaccttccattcccagatgatatggacaatgatattggcatattaatgactgggaacctccattcctctcccaactcttccccagtaccctccccaggctctccttctggaattggtgtgggctctcacttccagcatagtcggagccagggtgagcgtcttctttctagagaagcaccagaggagctaaagcagcagcccctggcccttgggtattttgtatcaactgccaaagctgagaatcttccccagtggttttggtcatcgtgtccccaggctcaaaaccagtgccctctcttcttaaaggcttcgctgcatcaccacatttcagtagcacagacagacgaacttctgcctgccaggaattctcagcgggttccacaccctcttgactccaaaaccacgtcggatgttttaaggtttgttttggagcagtacaacgctctgtcctggctcacgtgcaatccggccacccaggaccgtacttcctgccttcccgtccactttgtggtgctcactcagttgtacaatgccatcatgaatatactttaattggaaaagcacttgttctctctggctcagttccttctccctgcaacctcagtccaaggaacctgctacactctgcaaataacccacatccttttcttcagaccactctccacagtcctgcactgtgattccttctcagcaggcacatgtcaattctgcagtgttcattaccagagtgactccttgacacttctctcatggacctggaaacttccataagtggtgactttcagccagtgcggtggtgtgtgtagccccaaccactggtccccaggaagtggtggtggttgatggcttttcagcgggaaacagaagagacagtgtccttttgcacaagagtctgtgttttcagcctctgtatacaattgagggcagtctagccctttggatgaaatcctcttagttactggtgtatggcctgtgggttacctgaactccataatcggggactttttaaaaataagaaccagctcaagtacatggtttcatactggggtttctgtctccctagtgttcccatccagattagcatgagtgctttggttgacttcaaacctgtgtgtcaatgcagaaggtctggagacagcttcattttgtttatttattttaatttgttttgtcatatggtttttgtgactttatttttttaattcacaaggaccaggtacagtagctgaaacccaattcagatccaccataggattctttgactacatacctctgtcctagaagccggaaaaggagtaaaaacacattggggagatcatgcctaaaagtaatatattcaaaaccacccagcagtaggttttgttaacaacaaactggattttaaaagttctgccatgttaagtggccagcatttcatgaaggataacatttttatacagaaggcagtcaagctcaactcagagccatggaggcaagtaccttaattagttttatatagtcacaacggaaatatattttctagtgaattcttattggaagccaggtctctcctctcattagatcaaaagggacttatgtacatacaacaattgaaagtgtttgctcatgaaatcagttataaatatggtgaattttttctggaccataggaatattatttcaaagaaatattacaacttaaccattaaattagtacttgaagttgagcctttgtggtgggactttttaaaaaaatgcctttttaaagcattaatggctaattgaagtattttatgactcctcattcctggcccagagggttgtctttgaaaccctgtttctaacccttgtgttgtgtgtttctgtctgaggacagtgggtgtgtactggcctcccgggagccactgtgaccaggcctttgagctcttgtcatctgtggagagaatcatgcaaattttaaaagttcttccaagagacttccatgtcctggttattaacaaaaaaggaaaaatgtaataattgatatgattttgtaaaagtatttttcttgaaataatctaaagtttaaaacattatattaaaaaaaaaagttgtgtggtgggaatgtgaaagcagagaaataacttgtaaatggataattttgttctctgtaccaccagttgaagggggggttgactttcgcaatgtataggataaaaaatctgatatatcaaaccatttgtatctaatgtgtacagtgtaaaattgactttaaaaatattgcagtgctattttttcttaatcagaaaggaaaattctcaaggccttttgaagagcataagaagatgaagattgtaaacttgtataaaattatcttggtgagaagacaaattgtaaagtagatatttgtaatcttttaccactttggggttgcttttttcccggaattcatcagaactttgaattttttttttaaatgggctgtttttaatgcaggggcttttcttccctagaaacccaattctaagcagaaaaagaaaaaaaacacaaaaaataaaaaacccctacaaaaaaactttaaaaaaaatggcagcaaagggtagttttcatctggtgtcttttatttaagttttttaagttaagaaaagctggtgacatatttatacgtttttgtgcaaaaataaatgaatggcaatagattttaaaaaatcttattatgtacttctgtgtgaaaaagtctgtataatatttcccttaaatatgcattattttacttgtgagttttttactgaattaatctgaaatgtacaagccctggatttgctacagagtgagaagttattttatttttttttatttttaattttggaaattctgcagaaatcagaactcttaccatggtttgaacaaaaaaaggggaaatggggaggggaaaagggtgggattgtccagcatgcttgtatgtatatttcagaaccttttttaaatgtaaaagctgtacatttctgggaagttctgaatttcttttgtttccttttttccttcaagcattttgcagtgagcttcttttatatatagcaaacaatttgaaagaatacaaaaatatgtgaagttcatttaaaaaaataactacagtatagcgctggtacagtacactaaaagactttgataaaaagaaacaataataaaaggcctccattttaaatgtcattcatatataccttgtggatgagagctatatacttttacacacttttttagaggaataaattattgaattactgaaaaaaaaaaaaaaaaa

SEQ ID NO: 2286 - DNA, 1760 bp, Homo sapiens
cccggactctacacacacaagctaagacatatggttctatcttcagaaaacaatatggtgtttagagcctagatacgtgggtaacctttccagagatgtgacagaagtccttatacttcagttgttcagtcagattggaccctgtaaaagctgtaaaatgataacagagcatacaagcaatgacccatattgctttgtggaattttatgaacacagagatgcagctgctgcattagctgctatgaatgggagaaaaattttgggaaaggaggtcaaagtaaactgggcaaccacaccaagtagccagaaaaaagatacttccaatcacttccatgtgtttgttggggatttgagtccagaaattacaacagaagatatcaaatcagcatttgccccctttggtaaaatatcggatgcccgggtagttaaagacatggcaactggaaaatccaaaggctatggttttgtatctttttataacaaactggatgcagaaaatgcgattgtgcatatgggcggtcagtggttgggtggtcgtcaaatccgaaccaattgggccactcgtaaaccacctgcacctaaaagtacacaagaaaacaacactaagcagttgagatttgaagatgtagtaaaccagtcaagtccaaaaaattgtactgtgtactgtggaggaattgcgtctgggttaacagatcagcttatgagacagacattctcaccatttggacaaattatggaaataagagttttcccagaaaagggctattcatttgtcagattttcaacccatgaaagtgcagcccatgccattgtttcggtgaacggtactacgattgaaggacatgtggttaaatgctattggggtaaagaatctcctgatatgactaaaaacttccaacaggtaattcgatttttcatagcattctttaaggtttccatcttacatgtcacataaaagctttggaaactctgtaaaatgaacaataaaataaagcatatagctactttcagttgattgtatttcaaaattgattatttgcggtattaactgaatcttaatactttcttttcacaggtgtcaccaccccaataaacttagacaatgataaataacagagtcctattcacataagggtgcttacttagtttttctcttccttgtctcccactctttcttcatatacggtgtttcttatgtgttccctaaaacaatactttgctttttcctaggttgactatagtcaatggggccaatggagccaagtgtatggaaacccacaacagtatggacagtatatggcaaatgggtggcaagtaccgccttatggagtatacgggcaaccatggaatcaacaaggatttggagtagatcaatcaccttctgctgcttggatgggtggatttggtgctcagcctccccaaggacaagctcctccccctgtaatacctcctcctaaccaagccggatatggtatggcaagttaccaaacacagtgagccgggactctaaaaaaaaattgtaattcatgataggcttcgatttcctgtgacactctgaagacatgaaagtagacatcggaaaatgaaaatatttattttaaaaattgaaatgtttggaacctttagcacagatttgctttggtgaaggacacgtgtcttctagttctgcctttttaagtttttgttcatgatggatatgaacatgatttttctttatgtacaaaaactaaaataaagtcaataaagacaattctgactac

SEQ ID NO: 2287 - DNA, 7218 bp, Homo sapiens
gccccgcatcgtgcccggccccgtcgcggagatcccggacgaccgtcgcgggttgatggtcgcattccagatgtaaacagcttcagaagcctgacggtcatatggtagaatcactgtggactgagacccacctttctagacctgaagcccaggaggaggaagaggaggctggttggtaccatgggcataatgctctgaatcctagtctctcacctagtatgtgagcagtccctgcagatggcccatttggagatcttgacaaagcctcttctgtttccaatggggtttttggcgcattctcacagacttagatgaaactgtgatggccaccgcagggggcaggtgctgacatcgtccccagccctgtggctgttcatccggacatcatttccaacctcaatatctaaatgccacagtgctcttggagcaagttgggctggggaccactgttgccttttaagaccataaaaccatgggaaacgcagaaagtcaacatgtagagcacgagttttatggagaaaagcatgccagcctggggcgcaagcacacttcccgctccctgcgcctctcgcacaagacgcggaggaccaggcacgcttcctcggggaaggtgatccacaggaactccgaagtgagcacccgatccagcagcacccccagcatcccccagtccctggctgaaaatggcctggagcccttctcccaagatggtaccctagaagacttcgggagccccatctgggtggaccgagtggacatgggcttgagacctgtgtcttacactgactcttctgtcactcccagcgtagacagcagcatcgtcctcacagcagcctctgtgcagagcatgccagacactgaggagagcaggctttacggggatgacgctacatatttggctgagggaggcaggaggcagcattcctatacatccaatgggcccactttcatggagacggcgagctttaagaagaaacgctccaaatctgcagacatctggcgggaggacagcctggaattctcactctctgatctgagccaagaacatttaacaagcaacgaagaaatcttgggttccgccgaagagaaggactgcgaggaggctcgggggatggaaacgcgggcgagtccgcggcagctcagcacctgtcagagagccaattccttgggtgacttgtatgctcagaaaaactctggagtgacagcaaacggggggccggggagcaaatttgcaggctactgtcggaatttggtgtctgatattcccaatcttgcaaaccataagatgccaccagctgctgctgaagagactcctccgtacagtaattataacacacttccctgtaggaaatctcactgtctctctgaaggtgccaccaacccacaaattagccatagcaacagcatgcaaggcagaagagctaaaacaactcaggatgttaatgcaggcgagggcagtgagtttgcagacagtgggattgaaggggccactaccgacacggacctcctgtccaggcgatctaatgccaccaactccagctactcacccaccacaggccgggcctttgtgggcagcgacagcggcagcagctccaccggggatgcggctcgtcagggggtgtacgagaacttccggcgggagctggagatgagcaccaccaacagcgagagcctggaggaggccggctcggcgcacagcgatgagcagagcagcggcaccctgagctctccgggccagtcggacatcctgctgaccgccgcacagggcacggtgcgcaaggccggcgccctggccgtcaagaacttcctggtgcacaagaagaacaagaaggtggagtcagccacccggaggaagtggaagcactactgggtgtccctgaaaggatgcacgctatttttctacgagagcgacggcaggtctgggatagaccacaacagcatccccaaacacgccgtctgggtggagaacagcattgtgcaggcggtgcctgagcaccccaagaaggactttgtcttctgcctcagcaattccctgggtgatgccttcctttttcagaccactagccagacggagcttgaaaactggatcaccgccatccactctgcctgcgccactgcggtcgcgaggcaccaccacaaggaagacacgctccgactcctgaaatcagagatcaaaaaactggaacagaagattgacatggatgaaaagatgaagaaaatgggtgaaatgcagctgtcttcagtcactgactcaaagaaaaagaaaacaatattagatcagatctttgtctgggagcaaaatctcgagcagttccaaatggacctgtttcgtttccgctgttatttagccagccttcagggtggggagctgccaaaccccaaaaggcttctcgcttttgcaagtcgaccaacgaaagtggccatgggccgccttggaatcttttcggtatcatcgtttcatgccctggtggcagcacgcactggtgaaactggagtgagaagacgtactcaggccatgtccagatccgcgagcaagcgaaggagcaggttttcttctctgtggggtctggatactacctccaaaaagaagcagggacggccaagcatcaatcaggtgtttggagagggaaccgaagctgtaaagaaatctttagagggaatatttgatgacattgttccagatggcaagagggagaaagaagtggtcttacctaacgttcaccagcacaaccctgactgcgacatttgggtccacgagtatttcactccatcctggttctgtctgcccaataatcagcctgccctgacggtcgtccggccaggcgacactgcacgggacaccctggagctgatttgcaagacacatcaactggatcattctgctcattacctgcgcctgaaatttctaatagaaaacaaaatgcagctctatgttccacagcccgaggaagacatctatgagctgctgtacaaagaaattgaaatctgtccaaaagtcactcagagcatccacattgagaagtcagatacagctgctgatacttacgggttttcactttcttctgtggaagaagatggtattcgaaggctgtacgtgaatagtgtgaaggaaaccggtttagcttccaagaaaggcctgaaagcaggagatgagattcttgagatcaataatcgtgctgctgacgccctgaactcttctatgctcaaagatttcctctcacagccctcgctgggcctcctggtgaggacctaccccgagctggaggaaggagtggagctgctggaaagcccgccccaccgagtggacggccctgccgaccttggcgagagccccctcgcctttctcaccagcaacccagggcacagcctttgcagcgagcagggcagcagtgctgagaccgctccagaggagaccgaggggccagacttggaatcctcagatgagactgatcacagcagcaagagtacagaacaggtggccgcattttgccgcagtttgcatgagatgaacccctctgaccagagcccatctcctcaggactccacggggcctcagctggcgaccatgagacaactctcggatgcagataagctgcgcaaggtgatctgcgagctcctggagacggagcgcacctacgtgaaggatttaaactgtcttatggagagatacctaaagcctcttcaaaaagaaacttttctcacccaggatgagcttgacgtgctttttggaaatttaacggaaatggtagagtttcaagtagaattccttaaaactctagaagatggagtgagactggtacctgatttggaaaagcttgagaaggttgatcaatttaagaaagtgctgttctctctggggggatcattcctgtattatgctgaccgcttcaagctctacagtgccttctgcgccagccacacaaaagttcccaaggtcctggtgaaagccaagacagacacggctttcaaggcattcttggatgcccagaacccgaagcagcagcactcatccacgctggagtcgtacctcatcaagcccatccagaggatcctcaagtacccacttctgctcagggagctgttcgccctgaccgatgcggagagcgaggagcactaccacctggacgtggccatcaagaccatgaacaaggttgccagtcacatcaatgagatgcagaaaatccatgaagagtttggggctgtgtttgaccagctgattgctgaacagactggtgagaaaaaagaggttgcagatctgagcatgggagacctgcttttgcacactaccgtgatctggctgaacccgccggcctcgctgggcaagtggaaaaaggaaccagagttggcagcattcgtcttcaaaactgctgtggtccttgtgtataaagatggttccaaacagaagaagaaacttgtaggatctcacaggctttccatttatgaggactgggaccccttcagatttcgacacatgatccccacggaagcgctgcaggttcgagctttggcgagtgcagatgcagaggcaaatgccgtgtgtgaaattgtccatgtaaaatccgagtctgaagggaggccggagagggtctttcacttgtgctgcagctccccagagagccgaaaggatttcctaaaggctgtgcattcaatcctgcgtgataagcacagaagacagctcctcaaaaccgagagccttccctcatcccagcaatatgtcccttttggaggcaaaagattgtgtgcactgaagggggccaggccggccatgagcagggcagtgtctgccccaagcaagtctcttgggaggaggaggcggcggctggctcgaaacaggtttaccattgattctgatgccgtctccgcaagcagcccggagaaagagtcccagcagccccccggtggtggggacactgaccgatgggtagaggagcagtttgatcttgctcagtatgaggagcaagatgacatcaaggagacagacatcctcagtgacgatgatgagttctgtgagtccgtgaagggtgcctcagtggacagagacctgcaggagcggcttcaggccacctccatcagtcagcgggaaagaggccggaaaaccctggatagtcacgcgtcccgcatggcacagctcaagaagcaagctgccctgtcggggatcaatggaggcctggagagcgcaagcgaggaagtcatttgggttaggcgtgaagactttgccccctccaggaaactgaacactgagatctgactgcgtcacctgccccgtagagaatgtgtgtagatacttcctgccctaactctgcccaccctcctgtaccgtcgacaagaatgtccccttaggtcgcgctcttgcacacacggttttggcagctgacttggttctgaagccatgtagccacccaactttgtcattttcaacaacatcagaaagaattgatcagaatcccaaataagcttgagtcctatcttctgtatattactaagggcttttatttattctcaataaatcagggcctgaacaattaaaagaaaaaagattctatagcactggaaagcaaatcaccccaggagttaacggatgtacaacagattaatttaagggatagtagcacacacacgatccttctatctgaaatcagtctcctagctggggaaacctctttcacacacaaaatgaaatgtgtacagcttgccgtgttctgactgtacccttccctcttccatgtctgagaatctccgtgtattttaagaatgtgtgaggagagggtggcgattcatgtttcaatgagcctctttttttttttccttcctgttttggtctatggctggtcttactctgtgtccatgttcggaagctctagttttgcatagaattatagagatgccaaactctttgaaaagagatccaaatttatcgcttgagagaaagaaaagaaacactattttttgtattttacctgagatacaggggcacaaatagatgagaattttacagtgttagtgtatgtatccctgagcctaaaaaatgaggatataaccttttacagagagagtgaggcgtggtggttttatatttatatatgaaaggccagcaagctcatgcgaaggatatacttttcttccaaaaagcggattttttttttttaatgtttgaatctatatttgagatgggagtttggttggattaaacatgacaccccggtgggcggtgtgtgtgtctgttgcacatggcagggaggggagcctccttctcatggggttgccatggtgatcattggtttttccatcaaaattgcatcttcatccatagattaccttccccttccctgacagtccataaccaaacctttaaacagaacaacctctttaaaaacttctcttgtgtttaacactttcttcatgccaacgaaacagggtaaacatgctcaaaacattaacagtctaaacagatatccaaatactaagaagaaaaacaagttatagcactttcaattttttttttttttttaaaaaaaggtttatagctttttcttttcccatgtcacaatgtccacttcctaagaagggtttaaaatactatgaaaactttctttttggggaaaatatctatttggtgtttgacacatcagtaggtactttaaagacctgaattttatagtagctttaggagttatattttataaaaatcagttatgactttatatttccagacaatagagagttcagtacatcatgctcttgtgcctctgcctgcttttcctgcgttcccaccctgtattccccccgcctttcgggtttccagggcttcgagcttgatcttttgaaagttttattctattaaatttttgctatatcttctggttttctgaaaaagctttagaatggtttctataccctttgtatcactgcatttttccatatcatctccggttcgatcgcgtccagatggaaaacggaagcagaggcttctaatcgtcgcatttactggctccagtgcaacacatccatctgaaaacactcggaagtctggtgcttggagagggtgccattgtctcttgtacataaggtcatgacgtgtctatgtcaaaagttcttatatatttcttttataagctgaaagaaggtctatttttatgtttttaggtctatgaatggaacgttgtaaatgcttgtcaaacaataaaaataacgaaaagtgaaaaaaaaaaaaaaaaaaaa

SEQ ID NO: 2288 - DNA, 4738 bp, Homo sapiens
tccacacagtgagaccgtgaaagcagatgtccggggcactcctgggcagcttttgctcagtggatgatgggtgactacagattccttgaccacccccagcccatggaaattctcaacctgtacttgggagacagcctggagccccacccaggagagtgcccaagggaaacgtgcagccatgaggatccaccggagcctttcgaggagcaaacctgggccactgaccctcctgaacctaccagacaaaatgttcctccctggggctccggtgtggagctcacacacctggggagctgggtccatcaggacgggctggagccttgccaggagcaaacccgggccactgaccctcctgaatctaccagacaagatgctcctccctggggctccggtgtggagctcacacacctggggagcccctctgcccagagggagcacaggcagaacacagcatcaccagggtcaccagtgaacagccatctaccggggagcccaaagcagaaccggagcacgtccacacaggtagtgttctgggcaggcatcctgcaggcccagatgtgtgtcctagacctggaggaggagctggagaagacggaagggctcaaggctgggctgaaatgctgtctccccacgccccctgtggacctccccggggacacgggcctgcactccagcccacctgagaatgaagactcaggggaagacagcagtgagcctgagggagagggccaggcatggctgagagagggaaccccagactcttccccacagtggggagctgaggaggagagcatgttcttcagcaaccccctcttcctggcgagtccttgctcagagaacagtgcttctggagagtgcttttcctggggggcttcagactcccatgcaggtgtgaggactggacctgagagcccagcgactctggagcctcccctcccagaagacacagtgctgtgggagctggaaagtgagccagatttgggggacggcgctgctatcagtgggcattgtacccctccattccctgtgcccatctataaaccacactccatctgctgggcctcagtggctgccgctgagggggctcctgcagcacctcctggtcacggggagagtgagggagataggcttggtcctgctccatctgcagcaccgtgtgtggacgaagcattgacctgggaatcaggatgtgtcggatctgatcttggccctgctgcacatcctgtgcaaccttgggcctctctcagccctgagggctggcagagaggaggtcctttttggccccaggtgattcttaactcccaggacagagatgagagggagggtgggcacccccaggaatcttttccctgcaccttggccccctgcccctggaggagcccagcttcttctccagagcctagcagcccagaatctgagagcagaggccctggtcccaggcccagccctgcatcgtcccaggagggcagcccgcagcttcaacaccacagctcaggcattttgcccaagtggacactagatgcttcacagtcttcactcttggagacggatggggaacagccaagttccttgaagaaaaaggaggcaggggaggccccaaaaccaggcgaggaagtaaagagtgaaggaacagccaggcctgcagagactggagacgtccagcctgacattcacctgacttctgcagaacatgagaatctgaggacaccgatgaactcttcttggcttcctgggagccctatgccccaagcacagtccccagaggaaggccagagaccaccagctggagacaagctagctaatggcgtcaggaacaacaaggtagcctggaacttggcctcacgcctctatcgcctggagggcttccggaagtctgaagtggctgcctacctgcagaagaacaatgactttagcagggctgtggctgaggagtacctgtccttcttccagtttggaggccagagtctggaccgagccctccggagcttcctccaggccttggtgctcagtggggagactcaggaacgggagcgaatcctctaccagttctccagacgcttccaccattgcaatccggggatcttcccctcagtagattctgtacacaccttgacatgtgcaatcatgctgcttaacacggacctgcatggacagaacattgggaagagcatgagctgccaggaattcataaccaacctgaatgggctgagggatggcgggaacttccccaaggagctgctgaaggccctctactggtctatccgcagcgagaagctcgagtgggccgtggatgaagaagacacagccagacctgagaaggcccagccgtccctgccagctggcaagatgagcaagcccttccttcagctggctcaggatcccacagtgcccacctacaagcagggcatcctggctcggaaaatgcatcaagatgcagacggcaagaagacgccatggggcaagcgtggctggaagatgttccacaccttactgcgagggatggttctctacttcctgaagcagggagaagaccactgtctggagggggagagcttggtggggcagatggtggatgagcccgtgggggtgcaccactcgctggccacccccgccacgcattacaccaagaagccgcacgtcttccagctgcgcacggctgactggcgcctctacctcttccaggcacccactgccaaggagatgagctcctggatcgcgcgcatcaacttggctgcggccacccactccgcgccgcccttccccgccgctgtgggctcccagcgcagattcgtgcggcccatcctgcccgtgggccccgcccagagctccctggaggagcagcatcgatcccacgagaactgcctggacgctgccgcggacgacctgctggatctacagaggaacctgccggagcggcggggccgtggccgcgagctggaggagcaccgcctgcggaaggagtacctggagtacgagaaaacccgctacgagacctacgtgcagctgctggtggcccgcctgcactgcccctctgatgctctggacctgtgggaggagcagctggggagggaagctggaggcactcgggagcccaagctcagcctgaagaagtcccactcgagcccgtccctgcaccaggatgaggctcccaccacggccaaggtgaagcgcaacatctcagagcgcagaacctaccggaagatcatccctaagcggaaccgcaatcagctgtgaagccagcaccacctcagagacactgttccctgctcccagggttagacctgagatgaaactccctggaggagacttatttcaatgagtccaccatgacggatgaggcacctcctttccctgctgaaggacaaaccttgtttccctgtggccctcattcttgtgctccctgaagctttcctaatattgctgtgctccccaccacccccatggcagtccctccgcagccccagtccctggccacgcccaagggaagagggaggtgaggacttgactttcctcccagagctcagcccatgtcaccctccaggccccagaatccagagtggcctcatttcctagacttgctgagaactcagcacttgtttgagaaccagtgcttatgttggtgttgcccttggcttctgggggagagcttggggcagcagaggcccctgggcagcccagccaggggagccacagccccgaggatggtcttgctctgggaattaggtgaccttcctggggaggccccaggagagtgaatcagggactcttgagaaattcctaaccagcctcctgtgacccagggagcagggtcgctaaggtcctgcccactgaggggacagccttctgggcagggacctcggggggcttcaagggctctgcacggctgtggggccctgtgcctttgtctccttgtgtctcctttcccccgaagtagatgaaacagtctcacatacccaactgctcatcaacagagcagagctgatggcatgagtgagggctgggcggggtggggcctccagagctttgcagggaaccctggaaccctaggaacaaggagcctttgttccaacagagcagagaaggaggttctctatgttcagaccactggagaggatagagaggtaaaaggtggcgacagtttcccttaggggtctgcctggcaggagccacagctcaggagagttgtgagggatgggacggaggctggcgaccaggcgaggcctaggccaggctcgggagacttttctgtgctcctttctacacatgccttaaaccttccttcctgtggggtgcctggaccccttccccatctctggcagctcagagggtctctgctgctctcccctgggaaatcccctcatcctgccctctggctgcctcccagctgggcttgttctctgagggaggttccggagactcatggacttggggctctgcctgtaggaaggaggctgggccggagggaccagccaccattgtctctgttcagccaagtgtgcaagtaggctgcccgccaagagggggcctctgctacccgctgctgcctgccggctgacacactgcctccccagccttcctgctaggccaccctcctcccttcccatgcttgtaaccagctctggggcttgcacctccacaaagtaaggttggcccttggaggccatgtttgggtctccggccagggcctagggctaggccatgcacccaatgggttgcacaataaataacaggttcaaca

SEQ ID NO: 2289 - DNA, 3960 bp, Homo sapiens
cacaggctgagcagtcaggcccacagcatctgaccccaggcccagctcgtcctggctggcctgggtcggcctctggagtatggtctggcgggtgccccctttcttgctccccatcctcttcttggcttctcatgtgggcgcggcggtggacctgacgctgctggccaacctgcggctcacggacccccagcgcttcttcctgacttgcgtgtctggggaggccggggcggggaggggctcggacgcctggggcccgcccctgctgctggagaaggacgaccgtatcgtgcgcaccccgcccgggccacccctgcgcctggcgcgcaacggttcgcaccaggtcacgcttcgcggcttctccaagccctcggacctcgtgggcgtcttctcctgcgtgggcggtgctggggcgcggcgcacgcgcgtcatctacgtgcacaacagccctggagcccacctgcttccagacaaggtcacacacactgtgaacaaaggtgacaccgctgtactttctgcacgtgtgcacaaggagaagcagacagacgtgatctggaagagcaacggatcctacttctacaccctggactggcatgaagcccaggatgggcggttcctgctgcagctcccaaatgtgcagccaccatcgagcggcatctacagtgccacttacctggaagccagccccctgggcagcgccttctttcggctcatcgtgcggggttgtggggctgggcgctgggggccaggctgtaccaaggagtgcccaggttgcctacatggaggtgtctgccacgaccatgacggcgaatgtgtatgcccccctggcttcactggcacccgctgtgaacaggcctgcagagagggccgttttgggcagagctgccaggagcagtgcccaggcatatcaggctgccggggcctcaccttctgcctcccagacccctatggctgctcttgtggatctggctggagaggaagccagtgccaagaagcttgtgcccctggtcattttggggctgattgccgactccagtgccagtgtcagaatggtggcacttgtgaccggttcagtggttgtgtctgcccctctgggtggcatggagtgcactgtgagaagtcagaccggatcccccagatcctcaacatggcctcagaactggagttcaacttagagacgatgccccggatcaactgtgcagctgcagggaaccccttccccgtgcggggcagcatagagctacgcaagccagacggcactgtgctcctgtccaccaaggccattgtggagccagagaagaccacagctgagttcgaggtgccccgcttggttcttgcggacagtgggttctgggagtgccgtgtgtccacatctggcggccaagacagccggcgcttcaaggtcaatgtgaaagtgccccccgtgcccctggctgcacctcggctcctgaccaagcagagccgccagcttgtggtctccccgctggtctcgttctctggggatggacccatctccactgtccgcctgcactaccggccccaggacagtaccatggactggtcgaccattgtggtggaccccagtgagaacgtgacgttaatgaacctgaggccaaagacaggatacagtgttcgtgtgcagctgagccggccaggggaaggaggagagggggcctgggggcctcccaccctcatgaccacagactgtcctgagcctttgttgcagccgtggttggagggctggcatgtggaaggcactgaccggctgcgagtgagctggtccttgcccttggtgcccgggccactggtgggcgacggtttcctgctgcgcctgtgggacgggacacgggggcaggagcggcgggagaacgtctcatccccccaggcccgcactgccctcctgacgggactcacgcctggcacccactaccagctggatgtgcagctctaccactgcaccctcctgggcccggcctcgccccctgcacacgtgcttctgccccccagtgggcctccagccccccgacacctccacgcccaggccctctcagactccgagatccagctgacatggaagcacccggaggctctgcctgggccaatatccaagtacgttgtggaggtgcaggtggctgggggtgcaggagacccactgtggatagacgtggacaggcctgaggagacaagcaccatcatccgtggcctcaacgccagcacgcgctacctcttccgcatgcgggccagcattcaggggctcggggactggagcaacacagtagaagagtccaccctgggcaacgggctgcaggctgagggcccagtccaagagagccgggcagctgaagagggcctggatcagcagctgatcctggcggtggtgggctccgtgtctgccacctgcctcaccatcctggccgcccttttaaccctggtgtgcatccgcagaagctgcctgcatcggagacgcaccttcacctaccagtcaggctcgggcgaggagaccatcctgcagttcagctcagggaccttgacacttacccggcggccaaaactgcagcccgagcccctgagctacccagtgctagagtgggaggacatcacctttgaggacctcatcggggaggggaacttcggccaggtcatccgggccatgatcaagaaggacgggctgaagatgaacgcagccatcaaaatgctgaaagagtatgcctctgaaaatgaccatcgtgactttgcgggagaactggaagttctgtgcaaattggggcatcaccccaacatcatcaacctcctgggggcctgtaagaaccgaggttacttgtatatcgctattgaatatgccccctacgggaacctgctagattttctgcggaaaagccgggtcctagagactgacccagcttttgctcgagagcatgggacagcctctacccttagctcccggcagctgctgcgtttcgccagtgatgcggccaatggcatgcagtacctgagtgagaagcagttcatccacagggacctggctgcccggaatgtgctggtcggagagaacctagcctccaagattgcagacttcggcctttctcggggagaggaggtttatgtgaagaagacgatggggcgtctccctgtgcgctggatggccattgagtccctgaactacagtgtctataccaccaagagtgatgtctggtcctttggagtccttctttgggagatagtgagccttggaggtacaccctactgtggcatgacctgtgccgagctctatgaaaagctgccccagggctaccgcatggagcagcctcgaaactgtgacgatgaagtgtacgagctgatgcgtcagtgctggcgggaccgtccctatgagcgacccccctttgcccagattgcgctacagctaggccgcatgctggaagccaggaaggcctatgtgaacatgtcgctgtttgagaacttcacttacgcgggcattgatgccacagctgaggaggcctgagctgccatccagccagaacgtggctctgctggccggagcaaactctgctgtctaacctgtgaccagtctgacccttacagcctctgacttaagctgcctcaaggaatttttttaacttaagggagaaaaaaagggatctggggatggggtgggcttaggggaactgggttcccatgctttgtaggtgtctcatagctatcctgggcatccttctttctagttcagctgccccacaggtgtgtttcccatcccactgctcccccaacacaaacccccactccagctccttcgcttaagccagcactcacaccactaacatgccctgttcagctactcccactcccggcctgtcattcagaaaaaaataaatgttctaataagctccaaaaaaaaaaaaaaaaaaaaaaaaaaaaaaaaaaaaaaaaaaaaaaaaaaaaaaaaaaaaaaaaaaaaaaaaaaaaaaa

SEQ ID NO: 2290 - DNA, 4409 bp, Homo sapiens
tggcggaaaggctgcggccccgcgccagagggccggtggctcctccgggcttctgaggacccgcagggagcgggcctcatcatttctgtctcctgtttctccacttccttctctattggttggtccactgatgtatggacttgcacatgatgaactgtgaacttctagccacatgtagtgcccttgggtacttggagggagacacttaccataaggaaccagattgcttagagagcgtgaaggatctgatccgctatttgaggcatgaggatgagacacgagatgtgcggcagcagctgggggcagcccagatcctacagagcgaccttctgcccatcctcacccagcaccaccaggacaagcctctctttgatgctgttatcagactgatggtgaacttgacacaaccagccttgctctgttttggcaatctgcctaaggagcccagctttcggcaccattttttgcaggtgctaacttatttgcaggcctacaaagaggcctttgccagtgagaaggcttttggagtcctcagtgaaaccttgtatgagctgctgcagctgggctgggaggaacggcaggaggaagacaacttgctgattgaacggatcctactgctggtcagaaatattctccatgtcccagctgaccttgatcaggagaagaagattgatgatgacgccagtgcccatgaccagctcctctgggcgattcacctcagcggcctggatgacctgctcctctttctggccagctcgtctgctgaggagcaatggagcctacatgtgctagagattgtctcccttatgtttcgtgaccagaaccccgagcagctggcgggagtagggcagggacgcttagctcaggagcggagtgcagattttgcagaactggaggtattgcgccagcgagagatggcagaaaagaagactcgagccctccagcgaggcaacaggcattctcgatttgggggctcctatattgtccaggggttgaaatccattggggagagggacctcatctttcacaaaggccttcacaacctacgaaactacagttcagatttgggaaagcagccgaaaaaggtgcctaaacgtcgccaggccgcccgagagctgtccattcagcgccgttctgccctcaatgtgaggctcttcctcagagacttctgctctgagttcctggagaactgttacaaccggctcatgggatcagtaaaggatcacctgcttcgggagaaagctcagcagcatgatgagacctattatatgtgggccttggctttcttcatggccttcaaccgagctgcctccttccggccaggcctggtttctgagaccctcagtgtccgtaccttccacttcattgagcagaacctcaccaactactatgagatgatgctgactgaccgcaaggaagctgcctcctgggcacgccggatgcacttggctctgaaggcctatcaggagctgctggcaacagtgaatgagatggacttatctccagatgaggctgtgagggagagcagccgcatcatcaagaacaatattttctatgtgatggagtaccgagaactattcctggcactttttcgaaagtttgatgagagatgccagccccgctctttccttcgtgacctggtggagaccacccacctcttcctcaaaatgttggagcgattctgtcggagccgtgggaacctggtggtgcagaacaaacaaaagaagagaaggaagaagaagaagaaggtcctagaccaggccattgtttctggtaatgtcccatctagcccagaagaagtggaggctgtgtggccagccctggctgagcagctacagtgctgtgcccagaattctgagctcagcatggactccgtggttccctttgatgcggcctcagaggtgccagtggaggagcagcgggcagaagctatggtacggatccaagactgtctcctggctggccaggccccacaggccctgactctcctgaggtctgctcgggaggtgtggcctgaaggagatgtgtttggctctcaagacatttctccagaggaagagatccagttgctgaaacaaatcctctctgctccacttccccggcagcagggcccagaggaacgtggggcagaggaagaagaagaggaggaggaggaggaagaggaggagttgcaagtggtccaggtgtcggagaaagaatttaattttctggactacctgaaacgctttgcatgttcaactgtcgttcgagcctatgtgctgctactaaggagctaccagcagaatagtgcccacactaaccattgcattgtgaagatgctgcaccggctggcccatgacctcaaaatggaagccctactttttcagctgtcagtcttctgcctcttcaatcgtctgcttagtgaccctgctgctggagcctacaaagagctagtgacttttgccaaatacatcctgggcaaattttttgcactggctgcagtcaaccaaaaagcctttgtggagctgttgttctggaagaacacagctgtggttcgagagatgactgagggctatggctccctggatgacaggtcttccagtcgcagagcacctacatggagccccgaagaagaggctcatcttcaggagctgtacctcgccaataaggacgtggaagggcaggatgtggtggaagccatcttggcccacctgaatactgttcctcgaacacgcaagcagatcatccaccatctggtacagatgggactggctgacagtgtcaaggacttccaaaggaaaggaacccatattgtactgtggacgggggatcaggagttggagctgcagcggctttttgaggaattccgggactcagatgatgtcctgggtcatatcatgaagaatatcacagccaaacgctcacgggcccgaatagtggataaactcttggctctggggctggtggctgagcggcgggagctgtacaagaaacggcagaaaaagttggcatcctccatcttgccaaatggagcggagtccctgaaagatttttgccaggaagatctggaagaagaggaaaacctgcctgaggaagacagcgaagaggaagaagaagggggctcagaagcagaacaagtccagggtagcttagtcctttcaaatgaaaaccttggtcaaagcctgcatcaggaaggcttttctatcccgctcctatggctccagaactgcctgatccgagcagctgatgatcgggaagaggatggctgctcccaggccgttccattggtgccactcacagaggaaaatgaggaagccatggaaaacgaacagtttcagcagctgttgcgcaagctaggggttcggccccctgcctctgggcaggaaaccttctggcgaattccagccaagctgagtcctacccagctccggagggcagcagcttctttgagtcaaccagaggaggaacagaagctgcagccagagctgcagcctaaagtccctggagagcaaggctctgatgaggagcactgtaaagagcaccgagcacaagccctgagggccctcttgctagcccacaagaagaaagcgggcctggcatccccagaggaggaagacgctgttggtaaagagccgctgaaggcagcacccaagaaacgacaattgctggacagcgacgaggaacaggaagaagatgagggcaggaacagagcaccagagttgggagctccaggaatccaaaagaagaaacgataccagattgaggatgatgaggatgactgaagagctaagaagcctaggggtagagatagacacgtttttagatggtgcattcaagtcagagttggaagggtcatacaggacccagaagctcctcttactggacagagcagtagaatcccaggctctttcacggatttaggctgagaaacttcagcagcagtattggacttctctgctgtcagtctttgtttctcccagtttttatcggtatgccccagcagctctctggagatttagttctcttcttctaggaaccatttcttttggttattggagctccttagcaaataagaggagtgagtgaaatagagaaagcaccccggaccccttttattggtctgttcctttggctttctcttggaggtgggtcgcagcaccagatggggagctttatgacatgacaggcgggagttttgtaccacttttagaagataccagatgcctctgtcctcattttgtttcctatgatcatcctctagataccagatagaggcccattcctgcatttgagatagggttggaatatagtactctagatgatgaatgtgtttgctttgtgtttggtattaaacatgtaagattagaagttctcaaaaaaaaaaaaaaaaaaaaaaaaaaaaaaaaaaaaaaaaaaaaaaaaaaaaaaaa

SEQ ID NO: 2291 - DNA, 1691 bp, Homo sapiens
cgagggttgcttgggcagcgactgtcatggcggcggccgcccccaatgccggaggctcggcccctgagacagcgggttccgccgaagctccgctgcagtacagcctgctcctgcagtacctggtgggtgacaagcgtcagccccggctcctggagcctgggagcctgggcgggatcccaagtccagccaagagtgaggagcagaagatgatcgagaaggcgatggaaagctgcgctttcaaggctgcgctggcctgcgtgggaggatttgtcttaggaggtgcatttggggtgtttaccgctggcatcgataccaacgtgggctttgaccctaaggatccttaccgtacaccgactgcaaaagaagtgctgaaagacatggggcagagaggaatgtcctatgccaaaaatttcgccattgtgggagccatgttttcttgtactgagtgtttgatagaatcttaccggggaacatcagactggaagaacagtgtcatcagtggctgcatcacgggaggagctattggtttcagagctggcttaaaggctggggccattggttgtggaggttttgctgctttctctgctgcgattgattattacctccggtgagagtaattgcctgcagggaaggatgatgccagccccggatccgggctgctctctggaggacagtttctgtaccacaccagggccttgcttcagggcctgaagacattcattttccctcatgtcgttggtattctgagggagctgcctggcttctctgcctccagcctttggggtagccacactttgctgctcctggactccagccagccttcacagaggacgtcccgtgccagattctctcacagcagatcgggagacaggatgttgacatataggaattcagctccacaaagcttcaggcctgaccacagctggccctctaggttgtttggtgttgtgggcacagaggtgacagtgtctctgcaggcactcaggaagctgttctaccttggaactccatgcaactatccgtctcgaataccagggcagggcaaggcggactgatgccgtccaaccaattatctcacttgttttgtgttctgtcatccttgttttttttttaaaaatacactcccctcccccaccgccacacaccttacagttcaaaaggttggtttatttgtattttattttcaaattccctattccaaaaatagtgccgggtggcccaaagataacatctgaagggaaagaatgagaaagctcccagggaagcgggggatggggcgctgaggcagggttgttagaggactgtgtcatcctcaccaagctcattacatctgccagggcctgcctcaagaagcccagcccagccttttcctgggatgcagtgaaatcccatccatgaactcgatgggcccctcctgtgccggccgagaggcacacactgccttcacgacgtgactgctggacctggccgagcttgaggccacatgtgaagggtcctgctgtggtcatcttggtgactcggtcacagcagctactggccaagatcagacgtcgctgaggggctgttcaccaccatcctcgttctccagggtcaaggaagtgttttaacatgtcgtgttttcgacttgaccttgtggtatttttcttggcctagttgtgtgccatggatattaaaaaaaaaaaaaaaaaaaa

SEQ ID NO: 2292 - DNA, 1104 bp, Homo sapiens
gggcttgtgggtctttgagacccgaaaattgagagcgttttcgcactccagcggctgctcctggcggctctgcggccgtcaccatgccacagaatgaatatattgaattacaccgtaaacgctatggataccgtttggattaccatgagaaaaagagaaagaaggaaagtcgagaggctcatgaacgttcaaagaaggcaaagaaaatgattggtctgaaggctaagctttaccataaacagcgtcatgctgagaaaatacaaatgaaaaagactatcaagatgcatgaaaagagaaacaccaaacaaaagaatgatgaaaagacaccacagggagcagtacctgcctatctgctggacagagagggacaatctcgagctaaagtactttccaatatgattaaacagaaaagaaaagagaaggcgggaaaatgggaagtccctctgcctaaagtacgtgcccagggagaaacagaagtattaaaagttattcgaacaggaaagagaaagaagaaggcatggaagagaatggttactaaagtgtgctttgttggagatggctttacaagaaaaccacctaaatatgaaagattcatcaggccaatgggcttgcgtttcaagaaagcccatgtaacacatcctgaactgaaagccaccttttgcctaccaatacttggtgtaaagaagaatccctcatccccactgtatacaactttgggtgttattaccaaaggtactgtcattgaagtaaatgtgagcgaattgggccttgtgacgcaaggaggcaaagttatttggggaaaatatgcccaggttaccaacaatcctgaaaatgatggatgtataaatgcagtcttactggtttgacagcaatttcatatataattattgaggactacacaccaattgaagaaactgccattactgtgatgtttctgaatactaccaaacagccatacatgtctgcaatgaagagatttattaaattgtaaacattaaagtggtccagttttataaatggtctttattttgaaatacgctttgaccccatgttcataaaactgaatgattgaaaaaaagcaaatatacaaatatcctacttcat

SEQ ID NO: 2293 - DNA, 1451 bp, Homo sapiens
aggggcgctccggccagtgattggctggaggtttgttaactattcatgagggggcgggccgagcggggcggcctttgttaagcagcgagggcgcgaccgcgggtactctgctgccggcttctcggagcggcgctgggcgaccagagcagggtcgagatgtcctacatcccgggccagccggtcaccgccgtggtgcaaagagttgaaattcacaagctgcgtcaaggtgagaacttaatcctgggtttcagcattggaggtggaatcgaccaggacccttcccagaatcccttctctgaagacaagacggacaagggtatttatgtcacacgggtgtctgaaggaggccctgctgaaatcgctgggctgcagattggagacaagatcatgcaggtgaacggctgggacatgaccatggtcacacacgaccaggcccgcaagcggctcaccaagcgctcggaggaggtggtgcgtctgctggtgacgcggcagtcgctgcagaaggccgtgcagcagtccatgctgtcctagcagccaccaccatctgcgactcctgcctgccgcctctctgtacagtaacgccacttccacactctgtccccatctggcttctgctgaccgctgggccccagctcagaagggctatagctggtcccagaggcctggcctggccttccttcccttctcccatccctggcctggggcctctgggaccagctttctctcctggacaccgaggattggaaataagggcctggagctgagtagtagccagtctgctgtgaccacaggctcaggtccgaccctgctgcttggccacagcagtggctgggcaagtgggaaccactatctcttgggagcccccaaaagctgggaaatgctggaggaaccaggcctttcccgcttttgcctggctgcagggttcggctccgcccctgccccccagccctcgtgtgtccacaccgcagtgcctctgcccctcgggggactggacacacatcctgccagaggcgctacgaagctttgcccagatgaagccaggtgggctccgcgttcactcccactctcccgaggggtgctggcctccccagggtttgccttcttacggatttagacgaggttcgaggctcacctatcagggcagctctcaggattgtcattttcctctttgcctgtgggtttaacttttgtatttttttaatcacaagtttgatacaaaatgtttttatcgtactctttggagatgcccattctacttttgaatttagcttttactaattcgcatctggaagctcagcaagtgcacaagccttactttggttaccgtggaaaccactgccgcccctccccgatgtggtgcgctcaataaaaatgctggaattcaaaaaaaaaaaaaaaaaaaaaaaaaaaaaaaaaaaaaaaaaaaaaaaaaaaaaaaaaaaaaaaaaaaa

SEQ ID NO: 2294 - DNA, 4229 bp, Homo sapiens
gcgccgccatattccctcccgccggccggctccgcggcgcgcagccaccatgagcaccgccgccttccacatctccagcctcctggagaagatgacgtccagcgacaaggacttcaggttcatggccaccagcgacctgatgtcggagttgcagaaggactccatccagctggacgaggacagcgagcgcaaggtggtgaagatgctgctccggctcctggaggacaagaacggtgaggtgcagaacctggctgtcaagtggctgggtgtcccgctgggcgccttccacgccagcctcctgcactgtctgctgccacagctgagcagcccgcgcctggcggtgcgcaagcgggcggtcggagcgcttggccacctggcggccgcctgcagcaccgacctcttcgtcgagctcgctgaccacctactggaccggctgcccggcccgcgggtgcccaccagcccgactgccatccgcaccctgatccaatgtttgggcagcgtcggccgccaggccggccaccgcctcggggctcacctggaccgcctggtgcccctggtggaggatttctgcaacctggatgatgatgagctccgggagtcctgcctccaggcttttgaggccttcttgaggaagtgccccaaggaaatgggtcctcacgtgcccaacgtgaccagcctctgcctccaatacataaaacacgaccccaactacaactacgacagtgatgaggatgaggagcagatggagacagaggatagtgaattcagtgagcaagagagtgaagacgagtacagcgatgacgatgacatgagctggaaggtgcgccgggcagctgccaagtgcatcgcagccttgatcagctcgcggcctgacctgctgcccgatttccactgcaccctggcacctgtgctcatccgccgcttcaaagaacgcgaggagaacgtcaaggctgacgtcttcactgcttacatcgtgctgctgcggcaaacacagcccccgaagggatggctggaggccatggaggaacccacccagaccggcagcaacctccatatgctacgtggacaggtgccccttgtggtcaaggccctgcagcggcagcttaaagatcggagcgtcagagcccgccagggatgcttcagcctcctcaccgagctggcgggtgtcctcccaggcagcctggccgagcatatgcctgtgctggtatcaggcatcatcttctcgctggccgaccgctccagctcctccaccatccggatggatgccctggccttcttgcaggggctgctgggcaccgaaccagctgaggccttccacccacacttgcctatcctcctgccacctgtgatggcctgtgtggctgactctttctacaagattgcagccgaggccctggtggtgctgcaggagctggtgcgggccctgtggccgctgcacaggcctcggatgctggatcctgagccatatgttggagagatgtctgctgtcaccctggcgcgacttcgtgccactgacctggaccaggaggtgaaggagcgggccatttcctgcatgggccaccttgtaggccacctgggtgaccggcttggggatgacctggagcccacgttactgctcctcctggaccgcctgcggaatgagatcacccggctgcccgccatcaaggcgcttacgctggtggccgtatccccactacagcttgacctacagcccatcctggccgaggcactgcacattctggcctcattcctgcggaagaaccagcgggctttgcgactggccacactggcagccctggacgccctggcccagagccagggcctcagcctcccaccgtctgccgtgcaggccgtgctggctgagctgcctgccctggtcaacgagagcgacatgcatgtggcccagctggctgtggacttccttgccacagtgacccaggcccagccagcctctttggtggaggtcagtggccctgtgctctcagagctgctgcggctgctgcgttcgcccctgttgccagccggggttctggcagctgctgaaggcttcctgcaggccctggtagggacccgtcccccgtgtgtggactatgccaaactcatcagcctgctcactgcgcctgtttatgagcaggctgtggatggtgggcctggcctgcacaagcaggtgttccactcattggcccggtgtgtggcagccctctcagctgcctgtccccaagaggcggcaagcacagccagtcgcctggtctgcgatgccaggtcgccccactccagcacgggggtcaaggtcctggcattcttgtcgctggctgaggtgggtcaggtggctgggccaggccaccagcgggagctgaaggcggtgctcctggaagctttggggtcacccagtgaggatgtgagggctgcagcctcgtatgcactgggccgtgtgggtgctggcagcctgcccgacttcctgcccttcctgctggagcagatcgaggctgagccccgacgacagtacctgctgctgcactcactcagggaggccctgggggccgcccagcctgacagcctgaagccctacgccgaggacatctgggccttgctgttccagcgctgcgagggtgctgaggagggcacccggggggtggtggccgagtgcattgggaagctggtccttgtgaacccttcgttccttctgccccgcttgcggaagcagcttgctgcaggtcggccacacacccggagcaccgtcatcacagcggtcaagttccttatctcggaccagccccatcccattgaccccctcctgaagagcttcatcgctgtgcacaacaagccctcgctagtccgggacctgctggatgacatcctgcccctcctctaccaggagacaaagatccggcgggacctcatccgagaggtggagatggggccctttaaacatacagtggacgatgggctggacgtgcggaaggcggcctttgaatgcatgtattcactgcttgagagctgcctgggccagctggatatctgtgagttcctgaaccatgtggaggacgggctgaaggaccactacgacatccggatgctgaccttcatcatggttgcccggctggccaccctgtgtcctgcacctgtcctgcagagggtggaccgactcattgagccactaagggccacctgcactgccaaggtcaaagctggttctgtgaagcaggagtttgaaaagcaagatgaactgaagcgctctgcaatgagggcagtggctgccctgctgaccatccccgaggtggggaaaagccccatcatggccgacttctcttcccaaatcagatccaaccctgaacttgctgccctctttgaaagcatccagaaggattccgcttcagcccccagcacagactcaatggagctcagctagtcccctcagcaccaaggtgggccctcgcttaagagaaaggagcccacccaagtccgaggcctccccatcccaccatcgcaggtctctacttttgcccttccaccatctcactgggggccctgtcgctcctggtcagggcttacagtgccttctccagggacccaactcaaaggcccccagcccaagctgtgaggctgccaacagttgggccccttccttaactcaggacagtcatccaaagaaatagggtgaggaagttttccagtgacttcacactgtacccctccatagtctgtctggttccttcagagggtgtctctgcctcacaaactagtagtatttagaaataggctgtgctgtcagctgtaaaagatcaggaggcagcagacaccactctggtttcttcactgcattcagcaatgcctgaagttagtgctcaggccgggcatctcaaaagaaaagatacttgagttattcacattttaaaattcaaaacggttcatttttaagtggcagtgatgaatcagaaatttggaagatgatacgggtttcttttttccagggaggaggaatgggttgggtagggaactggacaggcttggacctcatgtttcatttctaatttcaaaatacttattagcaaattgggcaacaatgggcatcttccatgccaccacccaggcataaccagttggtttgtttccttctgaggaaggtttcaaatgtgtctagtgttcagtattgaggacaaagaaatacaagtggcaggcccaagtattttctgtgatatcccaggttaataaagattagattctaagtt

SEQ ID NO: 2295 - DNA, 4177 bp, Homo sapiens
gccacgctcgggtcgggggcgggctgacgccgccgccgccgcgggaggagggacaaaggggtgggtccccgcgggtcggcaccccggcggttgggctgcgggtcagagcactgtccggtggtgcccaggaggagtaggagcaggagcagaagcagaagcggggtccggagctgcgcgcctacgcgggacctgtgtccgaaatgccggtgcgaggagaccgcgggtttccaccccggcgggagctgtcaggttggctccgcgccccaggcatggaagagctgatatgggaacagtacactgtgaccctacaaaaggattccaaaagaggatttggaattgcagtgtccggaggcagagacaacccccactttgaaaatggagaaacgtcaattgtcatttctgatgtgctcccgggtgggcctgctgatgggctgctccaagaaaatgacagagtggtcatggtcaatggcacccccatggaggatgtgcttcattcgtttgcagttcagcagctcagaaaaagtgggaaggtcgctgctattgtggtcaagaggccccggaaggtccaggtggccgcacttcaggccagccctcccctggatcaggatgaccgggcttttgaggtgatggacgagtttgatggcagaagtttccggagtggctacagcgagaggagccggctgaacagccatggggggcgcagccgcagctgggaggacagcccggaaagggggcgtccccatgagcgggcccggagccgggagcgggacctcagccgggaccggagccgtggccggagcctggagcggggcctggaccaagaccatgcgcgcacccgagaccgcagccgtggccggagcctggagcggggcctggaccacgactttgggccatcccgggaccgggaccgtgaccgcagccgcggccggagcattgaccaggactacgagcgagcctatcaccgggcctacgacccagactacgagcgggcctacagcccggagtacaggcgcggggcccgccacgatgcccgctctcggggaccccgaagccgcagccgcgagcacccgcactcacggagccccagccccgagcctagggggcggccggggcccatcggggtcctcctgatgaaaagcagagcgaacgaagagtatggtctccggcttgggagtcagatcttcgtaaaggaaatgacccgaacgggtctggcaactaaagatggcaaccttcacgaaggagacataattctcaagatcaatgggactgtaactgagaacatgtctttaacggatgctcgaaaattgatagaaaagtcaagaggaaaactacagctagtggtgttgagagacagccagcagaccctcatcaacatcccgtcattaaatgacagtgactcagaaatagaagatatttcagaaatagagtcaaaccgatcattttctccagaggagagacgtcatcagtattctgattatgattatcattcctcaagtgagaagctgaaggaaaggccaagttccagagaggacacgccgagcagattgtccaggatgggtgcgacacccactccctttaagtccacaggggatattgcaggcacagttgtcccagagaccaacaaggaacccagataccaagaggaccccccagctcctcaaccaaaagcagccccgagaacttttcttcgtcctagtcctgaagatgaagcaatatatggccctaataccaaaatggtaaggttcaagaagggagacagcgtgggcctccggttggctggtggcaatgatgtcgggatatttgttgctggcattcaagaagggacctcggcggagcaggagggccttcaagaaggagaccagattctgaaggtgaacacacaggatttcagaggattagtgcgggaggatgccgttctctacctgttagaaatccctaaaggtgaaatggtgaccattttagctcagagccgagccgatgtgtatagagacatcctggcttgtggcagaggggattcgttttttataagaagccactttgaatgtgagaaggaaactccacagagcctggccttcaccagaggggaggtcttccgagtggtagacacactgtatgacggcaagctgggcaactggctggctgtgaggattgggaacgagttggagaaaggcttaatccccaacaagagcagagctgaacaaatggccagtgttcaaaatgcccagagagacaacgctggggaccgggcagatttctggagaatgcgtggccagaggtctggggtgaagaagaacctgaggaaaagtcgggaagacctcacagctgttgtgtctgtcagcaccaagttcccagcttatgagagggttttgctgcgagaagctggtttcaagagacctgtggtcttattcggccccatagctgatatagcaatggaaaaattggctaatgagttacctgactggtttcaaactgctaaaacggaaccaaaagatgcaggatctgagaaatccactggagtggtccggttaaataccgtgaggcaaattattgaacaggataagcatgcactactggatgtgactccgaaagctgtggacctgttgaattacacccagtggttcccaattgtgatttttttcaacccagactccagacaaggtgtcaaaaccatgagacaaaggttaaatccaacgtccaacaaaagttctcgaaagttatttgatcaagccaacaagcttaaaaaaacgtgtgcacacctttttacagctacaatcaacctaaattcagccaatgatagctggtttggcagcttaaaggacactattcagcatcagcaaggagaagcggtttgggtctctgaaggaaagatggaagggatggatgatgaccccgaagaccgcatgtcctacttaaccgccatgggcgcggactatctgagttgcgacagccgcctcatcagtgactttgaagacacggacggtgaaggaggcgcctacactgacaatgagctggatgagccagccgaggagccgctggtgtcgtccatcacccgctcctcggagccggtgcagcacgaggagatcgaaattgcccagaagcatcctgatatctatgcagttccaatcaaaacgcacaagccagaccctggcacgccccagcacacgagttccagaccccctgagccacagaaagctccttccagaccttatcaggataccagaggaagttatggcagtgatgccgaggaggaggagtaccgccagcagctgtcagaacactccaagcgcggttactatggccagtctgcccgataccgggacacagaattatagatgtctgagcacggactctcccaggcctgcctgcatggcatcagactagccactcctgccaggccgccgggatggttcttctccagttagaatgcaccatggagacgtggtgggactccagctcgtgtgtcctcatggagaacccaggggacagctggtgcaaattcagaactgagggctctgtttgtgggactgggttagaggagtctgtggctttttgttcagaattaagcagaacactgcagtcagatcctgttacttgcttcagtggaccgaaatctgtattctgtttgcgtacttgtaatatgtatattaagaagcaataactatttttcctcattaatagctgccttcaaggactgtttcagtgtgagtcagaatgtgaaaaaggaataaaaaatactgttgggctcaaactaaattcaaagaagtactttattgcaactcttttaagtgccttggatgagaagtgtcttaaattttcttcctttgaagctttaggcagagccataatggactaaaacattttgactaagtttttataccagcttaatagctgtagttttccctgcactgtgtcatcttttcaaggcatttgtctttgtaatattttccataaatttggactgtctatatcataactatacttgatagtttggctataagtgctcaatagcttgaagcccaagaagttggtatcgaaatttgttgtttgtttaaacccaagtgctgcacaaaagcagatacttgaggaaaacactatttccaaaagcacatgtattgacaacagttttataatttaataaaaaggaatacattgcaatccgtaaaaaaaaaaaaaaaaa

SEQ ID NO: 2296 - DNA, 1616 bp, Homo sapiens
gcgcacgtcccggattcctcccacgagggggcgggctgcggccaaatctcccgccaggtcagcggccgggcgctgattggccccatggcggcggggccggctcgtgattggccagcacgccgtggtttaaagcggtcggcgcgggaaccaggggcttactgcgggacggccttggagagtactcgggttcgtgaacttcccggaggcgcaatgagctgcattaacctgcccactgtgctgcctggctcccccagcaagacccgggggcagatccaggtgattctcgggccgatgttctcaggaaaaagcacagagttgatgagacgcgtccgtcgcttccagattgctcagtacaagtgcctggtgatcaagtatgccaaagacactcgctacagcagcagcttctgcacacatgaccggaacaccatggaggcactgcccgcctgcctgctccgagacgtggcccaggaggccctgggcgtggctgtcataggcatcgacgaggggcagtttttccctgacatcgtggagttctgcgaggccatggccaacgccgggaagaccgtaattgtggctgcactggatgggaccttccagaggaagccatttggggccatcctgaacctggtgccgctggccgagagcgtggtgaagctgacggcggtgtgcatggagtgcttccgggaagccgcctataccaagaggctcggcacagagaaggaggtcgaggtgattgggggagcagacaagtaccactccgtgtgtcggctctgctacttcaagaaggcctcaggccagcctgccgggccggacaacaaagagaactgcccagtgccaggaaagccaggggaagccgtggctgccaggaagctctttgccccacagcagattctgcaatgcagccctgccaactgagggacctgcgagggccgcccgctcccttcctgccactgccgcctactggacgctgccctgcatgctgcccagccactccaggaggaagtcgggaggcgtggagggtgaccacaccttggccttctgggaactctcctttgtgtggctgccccacctgccgcatgctccctcctctcctacccactggtctgcttaaagcttccctctcagctgctgggacgatcgcccaggctggagctggccccgcttggtggcctgggatctggcacactccctctccttggggtgagggacagagccccacgctgttgacatcagcctgcttcttcccctctgcggctttcactgctgagtttctgttctccctgggaagcctgtgccagcacctttgagccttggcccacactgaggcttaggcctctctgcctgggatgggctcccaccctcccctgaggatggcctggattcacgccctcttgtttccttttgggctcaaagcccttcctacctctggtgatggtttccacaggaacaacagcatctttcaccaagatgggtggcaccaaccttgctgggacttggatcccaggggcttatctcttcaagtgtggagagggcagggtccacgcctctgctgtagcttatgaaattaactaattgaaaattcactggttggtggaaaaaaaaaaaaaaaaaaaaaa

SEQ ID NO: 2297 - DNA, 6654 bp, Homo sapiens
ctcacacttttgctctcttgcagtcagttgctttgctggcttctgcaggcttttaaggtctcgcggcgtagaaatgcctggcccccacccccttcctcggtctcccctttcaattcagatgtgctgatgtgcagaccggattcatcttctcggagctgcggcggcggctttgggctcaggcggcggcggctcgcgctcggccgcggagtcctggcagcagcggggacgcggcgcgggagtccgagctctggtggcagctgagcccgcggggcgccgctcgccgagccgcggccgcgggaagttcggcagccagaaggacgacctggcaggctgcgagcgccagcgccgccagagccgagtttgcctgcgccctccccgcctccgagtgcagagttccttacctgccctccgcccacccgtgggcccctagccaacttctccctgcgactgggggtaacaggcagtgcttgccctctctactgtcccggcggcatccacatgtttccggacacctgagcaccccggtcccgccgaggagcctccgggtggggagaagagcaccggtgcccctagccccgcacatcagcgcggaccgcggctgcctaacctctgggtcccgtcccctccttttcctccgggggaggaggatggggttgggaacgctttccccgaggatgctcgtgtggctggtggcctcggggattgttttctacggggagctatgggtctgcgctggcctcgattatgattacacttttgatgggaacgaagaggataaaacagagactatagattacaaggacccgtgtaaagccgctgtattttggggcgatattgccttagatgatgaagacttaaatatctttcaaatagataggacaattgaccttacgcagaacccctttggaaaccttggacataccacaggtggacttggagaccatgctatgtcaaagaagcgaggggccctctaccaacttatagacaggataagaagaattggctttggcttggagcaaaacaacacagttaagggaaaagtacctctacaattctcagggcaaaatgagaaaaatcgagttcccagagccgctacatcaagaacggaaagaatatggcctggaggcgttattccttatgttataggaggaaacttcactggcagccagagagccatgttcaagcaggccatgaggcactgggaaaagcacacatgtgtgactttcatagaaagaagtgatgaagagagttacattgtattcacctataggccttgtggatgctgctcctatgtaggtcggcgaggaaatggacctcaggcaatctctatcggcaagaactgtgataaatttgggattgttgttcatgaattgggtcatgtgataggcttttggcatgaacacacaagaccagatcgagataaccacgtaactatcataagagaaaacatccagccaggtcaagagtacaattttctgaagatggagcctggagaagtaaactcacttggagaaagatatgatttcgacagtatcatgcactatgccaggaacaccttctcaagggggatgtttctggataccattctcccctcccgtgatgataatggcatacgtcctgcaattggtcagcgaacccgtctaagcaaaggagatatcgcacaggcaagaaagctgtatagatgtccagcatgtggagaaactctacaagaatccaatggcaacctttcctctccaggatttcccaatggctacccttcttacacacactgcatctggagagtttctgtgaccccaggggagaagattgttttaaattttacaacgatggatctatacaagagtagtttgtgctggtatgactatattgaagtaagagacgggtactggagaaaatcacctctccttggtagattctgtggggacaaattgcctgaagttcttacttctacagacagcagaatgtggattgagtttcgtagcagcagtaattgggtaggaaaaggctttgcagctgtctatgaagcgatctgtggaggtgagatacgtaaaaatgaaggacagattcagtctcccaattatcctgatgactatcgcccgatgaaagaatgtgtgtggaaaataacagtgtctgagagctaccacgtcgggctgacctttcagtcctttgagattgaaagacatgacaattgtgcttatgactacctggaagttagagatggaaccagtgaaaatagccctttgatagggcgtttctgtggttatgacaaacctgaagacataagatctacctccaatactttgtggatgaagtttgtttctgacggaactgtgaacaaagcagggtttgctgctaacttttttaaagaggaagatgagtgtgccaaacctgaccgtggaggctgtgagcagcgatgtctgaacactctgggcagttaccagtgtgcctgtgagcctggctatgagctgggcccagacagaaggagctgtgaagctgcttgtggtggacttcttaccaaacttaacggcaccataaccacccctggctggcccaaggagtaccctcctaataagaactgtgtgtggcaagtggttgcaccaacccagtacagaatttctgtgaagtttgagttttttgaattggaaggcaatgaagtttgcaaatatgattatgtggagatctggagtggtctttcctctgagtctaaactgcatggcaaattctgtggcgctgaagtgcctgaagtgatcacatcccagttcaacaatatgagaattgaattcaaatctgacaatactgtatccaagaagggcttcaaagcacattttttctcagacaaagatgaatgctctaaggataatggtggatgtcagcacgaatgtgtcaacacgatggggagctacatgtgtcaatgccgtaatggatttgtgctacatgacaataaacatgattgcaaggaagctgagtgtgaacagaagatccacagtccaagtggcctcatcaccagtcccaactggccagacaagtacccaagcaggaaagaatgcacttgggaaatcagcgccactcctggccaccgaatcaaattagcctttagtgaatttgagattgagcagcatcaagaatgtgcttatgaccacttagaagtatttgatggagaaacagaaaagtcaccgattcttggacgactgtgtggcaacaagataccagatccccttgtggctactggaaataaaatgtttgttcggtttgtttctgatgcatctgttcaaagaaaaggctttcaagctacacattctacagagtgtggcggacgattgaaagcagaatcaaaaccaagagatctgtactcacatgctcagtttggtgataacaactacccaggacaggttgactgtgaatggctattagtatcagaacggggctctcgacttgaattatccttccagacatttgaagtggaggaagaagcagactgtggctatgactatgtggagctctttgatggtcttgattcaacagctgtggggcttggtcgattctgtggatccgggccaccagaagagatttattcaattggagattcagttttaattcatttccacactgatgacacaatcaacaagaagggatttcatataagatacaaaagcataagatatccagataccacacataccaaaaaataacaccaaaacctctgtcagaacacaaaggaatgtgcataatggagagaagacatattttttttaaaactgaagatattggcacaaatgttttatacaaagagtttgaacaaaaaatccctgtaagaccagaattatctttgtactaaaagagaagtttccagcaaaaccctcatcagcattacaaggatatttgaactccatgcttgatggtattaataaagctggtgaaagggcatcatatacttcaaggaagactctacaagcttttgttcacagcttgaaatagatgcctcacaattcagacagtttaattcaggaactgtgaccctgcagtgttctttttgacaatttgtcaagatttagggacataaaatgatcttgcaggtcgtaaactggaaaacagtattttggttgtcttaggataattgctgactttgtatcttggatacagtgtaaaccagatccatataaggtgaatgtgaaatgggagtcttctgagggtgatttgtactttccatgtgtatgtgtgtgtctggtgtttggaaactgggatatttcagcttcattatttccacttgcaggccagcttaacctctgaaacacaaatgatcttgagaccactttagtgtacttacatttagatgagtttgaaatctcaatggtgtctaattattgcagttaaattctagacatcagttctttaagtctcagaaaacgcccagtgaattggtaaacttagttcttttttttggaagtgctgccttttcacaccaaatccaagaagcctgtgatgtcttatgaaccttatgagaaaactccgaagaggtgtgagcaggattcttctgaatgactgtctggatggttcattactcaagttactgctgctgctattgtctttcctttgttgtcgatctgttattgttgtattattattgttgatgttgtcatggttaatctattttttaaaattgaaatgaagcagaagtaggccttgtgagaactgaaaggtctctttcatttttctcttcctgggattcattttttcaaaacacaatgctggaaaaaaaagatttgtttctgaaagacttcttatggtgctattccataaactttttttcaaacaagtttttgacctttgagccaacccacccgtagactacgaatgtctccctatggctggtagcatttgaagactaaagacttgtcaaatatatcaagagtatatcattgcaagggcagcacttgtcctgtggaacaactacttataatgccttagaattcctgcacatgatcaaacagatcctcctaaaacacaccttttgaaatgttgaacataatagtgtatgttaattaacagctctatgaagaaaatccatttccatgactgaagcattggatataaatatggtgtcctgctttttttgtagaaaatgtaatttgaggatgaattttctgctttaaaggcatgtgtgtttttaaaattaatgaatgtagatgtgtgattgtctgagtgagtgaaactacaagaggtaaaaaataatgggtggttgaaaagttaaaatgtatgtgccaagttctactagaattccatttgaaatagcaccttccttaggtttcatggacaaataatgggaacttctaattttgatcaatcccattaaaaaaaggctctttcctttagagaaactctattttgatgtcaatatagattactgtatgaagtagctttgtgtctgttacctgtccatgagcatacaacattgaatacaattgggtgtattctttcagttttacacaattaaagtatacacacagatgtagcttatctgtttttttcttaaattgttgccctgaaaaaatttcttgcatatgaattgtaaaatgtaaatacatttttataaccaatgttttgatcttattgaatgttactttgaaaatgtataactattgcctgcaatgtagatgagccttttagtagagctgatttattccagtaacttcttccatattttctcactaatctcccgttagccaaaatatgccagaaatgggaaagagaggagaaaaagtcattaacattaacacctatactgttctatactactcctacccgtgtgctaggaatgtgcactagctctttttaaattccatgctacactttgaggactgtcatcatgttctcgttttgtagttcagaaagtgaggctcaaagaatttatgtaaccttcccagagtcacagtgtaaagttagatgttgaaacccagtttatcttatacaaatgagcctctgcttgttctacaaaggtagtagaatcaatctcgacctatataaatagtagattttttatggtgaaactttcccacataaagtaaattttaggggtgaattagagtaaaacttacaggataagcattttgctctttttaagaacagcatgaaatttagaataccaatgatagctatctttaagaatcagaattagtactagaaatttaaaaaaccctatagtttggagttagtatgagccttttgtgaaaataaatatattaaattattttgcctgatgtggtaggggaaatgtattgctctatattaagaaatattctggatattctgattgacatcttattaggccatagtgagctatgctctgcacaactgagaaattaggtatttagaaggcatatagagatgttgtcataactaggtcttcaacgtgaaaattaatttttattgtatcatgtcaagtatcagtttaccacatattatttttatattaattcaacatttgccttaagtgtgttgttaaatgaaagtacagacagcttcattgttgtattgttaataattgttacttactgctccaggcattttattaaattaattttttaaattattttccaccctacatcagtatattggttgtgctttatatttgccaaagtcctaactgactatacatag

SEQ ID NO: 2298 - DNA, 6753 bp, Homo sapiens
gcagcctcggccgccgggcaagtagctccgagcggctgcttcccggttgcctcgacgaagacagggggcgccgcgctccgcttgctccgcgcctgagccatgcccagcagccctgtgtaaccaccgagtcccggccggagccgaccgacccagtgtgcgccgtctttcggccgagctgagctttcgtgcacgcaactccctctgccccagccggccccgcgccaccatgccccgggcgactgcacttggggccctggtgtcactgctgctgctgctgccgctgcctcgcggcgccgggggactcggggagcgcccggacgccaccgcagactactcagagctggacggcgaggagggcacggagcagcagctggagcattaccacgacccttgcaaagccgctgtcttttggggagacattgccttagatgaagatgacttgaagctgtttcacattgacaaagccagagactggaccaagcagacagtgggggcaacaggacacagcacaggtgggcttgaagagcaggcatctgagagcagcccagacaccacagccatggacactggcaccaaggaagctggaaaggatggccgggagaataccacactcctgcacagccctgggaccttgcatgccgcagccaagaccttctctccccgggtccgaagagccacaacctcaaggacagagaggatatggcctggaggagtcatcccctacgtcattggagggaacttcactgggagccagagggccatttttaagcaggccatgagacactgggagaagcacacctgtgtgaccttcatagaaaggacggatgaggaaagctttattgtattcagttacagaacctgtggctgttgctcctatgttgggcgccgaggaggaggcccacaggccatatccattgggaagaactgtgacaagtttggcattgtggctcacgagctgggccatgtggttgggttttggcatgaacacacccggccagacagagaccaacatgtcaccatcatcagggaaaacatccagccaggtcaggagtataatttcttaaaaatggaagctggggaagtgagctctctgggagagacatacgactttgacagcatcatgcactacgcccggaacaccttctcaagaggagttttcttagacaccatccttccccgtcaagatgacaatggcgtcaggccaaccattggccagcgcgtgcggctcagtcagggagacatagctcaagcccggaagctgtacaaatgcccagcgtgtggggagaccctgcaggacacaacgggaaacttttctgcacctggtttcccaaatgggtacccatcttactcccactgcgtctggaggatctcggtcaccccaggggaaaagatcgtattaaacttcacatccatggatttgtttaaaagccgactgtgctggtatgattacgtggaggtccgggatggttactggagaaaagccccccttttgggcaggttttgtggcgataagatcccggagcccctcgtctccacggacagccggctctgggtggagttccgcagcagcagcaacatcttgggcaagggcttctttgcagcgtacgaagctacctgcgggggagacatgaacaaagatgccggtcagattcaatctcccaactatccggatgactacagaccttccaaggaatgtgtctggaggattacggtttcagaggggtttcacgtgggacttaccttccaagcttttgagattgaaaggcacgacagctgtgcatatgactacctggaagtccgggatggccccacggaagagagtgccctgatcggccacttttgtggctatgagaagccggaggatgtgaaatcgagctccaacagactgtggatgaagtttgtgtccgatggctctatcaataaagcgggctttgcagccaattttttcaaggaggtggatgagtgttcctggccagatcacggcgggtgcgagcatcgctgtgtgaacacgctgggcagctacaagtgtgcctgtgaccctggctacgagctggccgccgataagaagatgtgtgaagtggcctgtggcggtttcattaccaagctgaatggaaccatcaccagccctgggtggccgaaggagtatcccacaaacaaaaactgtgtctggcaggtggtggcccccgctcagtaccggatctcccttcagtttgaagtgtttgaactggaaggcaatgacgtctgtaagtacgactttgtagaggtgcgcagcggcctgtcccccgacgccaagctgcacggcaggttctgcggctctgagacgccggaggtcatcacctcgcagagcaacaacatgcgcgtggagttcaagtccgacaacaccgtctccaagcgcggcttcagggcccacttcttctcagataaggacgagtgtgccaaggacaacggcgggtgtcagcatgagtgcgtcaacaccttcgggagctacctgtgcaggtgcagaaacggctactggctccacgagaatgggcatgactgcaaagaggctggctgtgcacacaagatcagcagtgtggaggggaccctggcgagccccaactggcctgacaaataccccagccggagggagtgtacctggaacatctcttcgactgcaggccacagagtgaaactcacctttaatgagtttgagatcgagcagcaccaggaatgtgcctatgaccacctggaaatgtatgacgggccggacagcctggcccccattctgggccgtttctgcggcagcaagaaaccagaccccacggtggcttccggcagcagtatgtttctcaggttttattcggatgcctcagtgcagaggaaaggcttccaggcagtgcacagcacagagtgcgggggcaggctgaaggctgaagtgcagaccaaagagctctattcccacgcccagtttggggacaacaactacccgagcgaggcccgctgtgactgggtgatcgtggcagaggacggctacggcgtggagctgacattccggacctttgaggttgaggaggaggccgactgcggctacgactacatggaagcctacgacggctacgacagctcagcgcccaggctcggccgcttctgtggctctgggccattagaagaaatctactctgcaggtgattccctgatgattcgattccgcacagatgacaccatcaacaagaaaggctttcatgcccgatacaccagcaccaagttccaggatgccctgcacatgaagaaatagtgctgatgttcttgaaagacagaaactgagaattttttttgttttgttttgtttttaacaacaatagcaccttgaaaatctgccctaaaacagtgtacagtatttttctcaaacaaaaactcagaatccagccttagaggtatatatttgaatgaaagtcttgtaagtttggccaacaaggtggagagaaaaatgttcttttgcttctgtctgcaatgttatcattcatgaactgttaaagtgttaaagattaggattgaagtcactgaccattccggctatgcttcttcataccattctccttgtcccttgctcctatgtggcaaaaggtcagccttggggttggccgttcctctaatctggacttgcttgcaaaggtgccaggctgtcttctgtccatgttgggcataagggatgaaaacttggccgagactaatgtgtggcccacagctttggctggaatcattttctttctctctgccagggacatgtcaaccaagaaacctgaaaatatggatggatgtcaggactaaaaaaaggcatcacagtgagcagtgagcacagagggagtttcgagtataagaatcattgtcatgaagttaggagaccacaaagccatttctcagagtcattcactctccttgtccctttggtttccccccctccctaattgcagtgggggctaaggcatccattatgaatacagcagaacatttgctggcgagagtcctgtctgctgagaagacaatattgtggctcgtcctgatatttttttcattcattgactttgagaagactccacctgtgcttggaattccatgggcttcaaagaacatttcttcttttagctttggaggcacttgccgtggcacacctggactccttgacatccaattcaaactgcatttgcaaaatgtgcaaagacctcttatgagggaccaattcaggtcccttatggggtgaacactgttgaagactggttaattataagttatgtaagaatcatcgccttgtggaacaagtcaatcagtgactagcttcctgtagccaatcaggttaaagagtgcgttggtaactttgctctgattaactagtattcaatcaccaacttgcaaacagaattcataacacttggcacttgttctagagaagtgtagaggatgatgtttacataattttagcacctcaaggtataatttaaacagtgaggtagttttgaatggcatttcattaaggcatctatgggcattatgagctaaaagctgtggtatgttagctttaaaagagtatttatgttggaataatttttaaataatgtttacataactgtaagtcctgtttggttgttgttggacgcagggcggcacatgagtgtttttggttagagccaagatagctcccatgcaccggaattcctttgggatgaatcagcatcattttaaacaaagtatatgtaaaaggtgaaaggttatattttttacagatcagaatgtggcaccagaggactgtgtctcattaaagtgattgctgggagcaaaaactagaatgatacaaagaaaggtcagagaaatgcatgggaatattttttccttaaaacagaaaaaaattaaagtattattaataatatatgtctgtatatatgtatgtatgtaaaagatcagctgtcaaagccttaatcaatgcagtgtggaaaatgccaacccctggtcctcgctttactgtgggccctgcaggactggctctccatttcctgcctctcctttcaccaagctctgttttggcctttctcggccctggactgaggctcagcctacacgctcatattgtgcatatggcagaccctgcccagcgtgcgctttgatacagcaaatggagcagctgacctcatggctccaatcccacctgcctgttagggtagattccatttatctgatttttgtattttctgaggttttatttggtctcatcttgtctatgagagttgaaactggaactgggaaacctaagatgggtgttatggttctttctccaaggaaataaaaattctgcagttttaacctttagaagtctaagcaagattaacaaatttcatagaaaagtgggagggagtcagaaacagagttggtgctgctcagcaggacggtgaaacaatgatacttctttttatctctttagtatgaacattttcaaaaacacacagcttcaacaattgtcaccatatggccaatttgcaacaatgggactcttatgaaaaacctttatttaggccttctgtgtgacgtatccacagaaaagagaagctctgattcagctggggctagctgggccgctcctctggaagcccacacttgtggggacttaggcatgacacaggttcttgcaaagaaactagaggctggcttcactagagagagtccattcagcagaaagtcccaggcctctgccttggtgcttccaattatcagtgacctgcctgcaagcatccccagaagcaaacagcagaggtagaagatatcactgcagcctgctttgtgctttaattgggtaccaagctttggggatgacagtgagttgcaagaatagttttagttcagagaattgtcttaggacaacaggctaatgaaggatttggggtctgggtttttagcctggctccgttctggtgtaacccggtctagcaaaagctaagcctggattgcagggcaggaaaaaatctggaattaactttagccagtggaatttcttcaaacagagaaagagaggctgttcattgatccactattccctctattttcctctaaggtaaatatttagaggtatttacctgtaaggtgaagtttcctttttatttctactttacaatttctctctaaagcaagcttgtccaacccttggcccaggacggctttgaatatggcccgacacaaattcgtaaactttttaaaaaacattgtaagattctttctgtgatttttttttttctcgtcagctatcgttagtgtattttatgtgtggcccaagataattcttcttccaatgtggcccagggaagccaaaagatgggacacccctgctgtaaagtttcatatcactcatgaattgctcagctgatttaaataatttgtaaaatcctgctaactagcaaattcacattgagattttctattgattgggtccctttgatagctttcagattggtattgttagcgttccatttgtgaacaaatgttcccttggctttagcagatgtttttaaagtttcttttgtagaccgaacttctgaagagtaataccaaatgcctaaaattttatttttaaaaaggaaaattgtttaaagtattatatgtaaacatatgggtattttttattttgtgtaattttacatttcatgaaatgatgtcagtttcaaagagaaagtggagaggacctaacatatgtctctacctagaacggatggtttcattaaagaatgtggattt

SEQ ID NO: 2299 - DNA, 3468 bp, Homo sapiens
ctcctgcatagagggtaccattctgcgctgctgcaagttacggaatgaaaaattagaacaacagaaacatggttctcttgacacttcagtgttagggaacatcagcaagacccatcccaggagaccttgaaggaagcctttgaaagggagaatgaaggagtcatctttgcaaaatagctcctgcagcctgggaaaggagactaaaaaggaaaacatgttccttcagtcgtcaatgctgacctgcattttcctgctaatatctggttcctgtgagttatgcgccgaagaaaatttttctagaagctatccttgtgatgagaaaaagcaaaatgactcagttattgcagagtgcagcaatcgtcgactacaggaagttccccaaacggtgggcaaatatgtgacagaactagacctgtctgataatttcatcacacacataacgaatgaatcatttcaagggctgcaaaatctcactaaaataaatctaaaccacaaccccaatgtacagcaccagaacggaaatcccggtatacaatcaaatggcttgaatatcacagacggggcattcctcaacctaaaaaacctaagggagttactgcttgaagacaaccagttaccccaaataccctctggtttgccagagtctttgacagaacttagtctaattcaaaacaatatatacaacataactaaagagggcatttcaagacttataaacttgaaaaatctctatttggcctggaactgctattttaacaaagtttgcgagaaaactaacatagaagatggagtatttgaaacgctgacaaatttggagttgctatcactatctttcaattctctttcacacgtgccacccaaactgccaagctccctacgcaaactttttctgagcaacacccagatcaaatacattagtgaagaagatttcaagggattgataaatttaacattactagatttaagcgggaactgtccgaggtgcttcaatgccccatttccatgcgtgccttgtgatggtggtgcttcaattaatatagatcgttttgcttttcaaaacttgacccaacttcgatacctaaacctctctagcacttccctcaggaagattaatgctgcctggtttaaaaatatgcctcatctgaaggtgctggatcttgaattcaactatttagtgggagaaatagcctctggggcatttttaacgatgctgccccgcttagaaatacttgacttgtcttttaactatataaaggggagttatccacagcatattaatatttccagaaacttctctaaacttttgtctctacgggcattgcatttaagaggttatgtgttccaggaactcagagaagatgatttccagcccctgatgcagcttccaaacttatcgactatcaacttgggtattaattttattaagcaaatcgatttcaaacttttccaaaatttctccaatctggaaattatttacttgtcagaaaacagaatatcaccgttggtaaaagatacccggcagagttatgcaaatagttcctcttttcaacgtcatatccggaaacgacgctcaacagattttgagtttgacccacattcgaacttttatcatttcacccgtcctttaataaagccacaatgtgctgcttatggaaaagccttagatttaagcctcaacagtattttcttcattgggccaaaccaatttgaaaatcttcctgacattgcctgtttaaatctgtctgcaaatagcaatgctcaagtgttaagtggaactgaattttcagccattcctcatgtcaaatatttggatttgacaaacaatagactagactttgataatgctagtgctcttactgaattgtccgacttggaagttctagatctcagctataattcacactatttcagaatagcaggcgtaacacatcatctagaatttattcaaaatttcacaaatctaaaagttttaaacttgagccacaacaacatttatactttaacagataagtataacctggaaagcaagtccctggtagaattagttttcagtggcaatcgccttgacattttgtggaatgatgatgacaacaggtatatctccattttcaaaggtctcaagaatctgacacgtctggatttatcccttaataggctgaagcacatcccaaatgaagcattccttaatttgccagcgagtctcactgaactacatataaatgataatatgttaaagttttttaactggacattactccagcagtttcctcgtctcgagttgcttgacttacgtggaaacaaactactctttttaactgatagcctatctgactttacatcttcccttcggacactgctgctgagtcataacaggatttcccacctaccctctggctttctttctgaagtcagtagtctgaagcacctcgatttaagttccaatctgctaaaaacaatcaacaaatccgcacttgaaactaagaccaccaccaaattatctatgttggaactacacggaaacccctttgaatgcacctgtgacattggagatttccgaagatggatggatgaacatctgaatgtcaaaattcccagactggtagatgtcatttgtgccagtcctggggatcaaagagggaagagtattgtgagtctggagctaacaacttgtgtttcagatgtcactgcagtgatattatttttcttcacgttctttatcaccaccatggttatgttggctgccctggctcaccatttgttttactgggatgtttggtttatatataatgtgtgtttagctaaggtaaaaggctacaggtctctttccacatcccaaactttctatgatgcttacatttcttatgacaccaaagatgcctctgttactgactgggtgataaatgagctgcgctaccaccttgaagagagccgagacaaaaacgttctcctttgtctagaggagagggattgggatccgggattggccatcatcgacaacctcatgcagagcatcaaccaaagcaagaaaacagtatttgttttaaccaaaaaatatgcaaaaagctggaactttaaaacagctttttacttggctttgcagaggctaatggatgagaacatggatgtgattatatttatcctgctggagccagtgttacagcattctcagtatttgaggctacggcagcggatctgtaagagctccatcctccagtggcctgacaacccgaaggcagaaggcttgttttggcaaactctgagaaatgtggtcttgactgaaaatgattcacggtataacaatatgtatgtcgattccattaagcaatactaactgacgttaagtcatgatttcgcgccataataaagatgcaaaggaatgacatttctgtattagttatctattgctatgtaacaaattatcccaaaacttagtggtttaaaacaacacatttgctggcccacagtttt

SEQ ID NO: 2300 - DNA, 4211 bp, Homo sapiens
ctcctgcatagagggtaccattctgcgctgctgcaagttacggaatgaaaaattagaacaacagaaacatggaaaacatgttccttcagtcgtcaatgctgacctgcattttcctgctaatatctggttcctgtgagttatgcgccgaagaaaatttttctagaagctatccttgtgatgagaaaaagcaaaatgactcagttattgcagagtgcagcaatcgtcgactacaggaagttccccaaacggtgggcaaatatgtgacagaactagacctgtctgataatttcatcacacacataacgaatgaatcatttcaagggctgcaaaatctcactaaaataaatctaaaccacaaccccaatgtacagcaccagaacggaaatcccggtatacaatcaaatggcttgaatatcacagacggggcattcctcaacctaaaaaacctaagggagttactgcttgaagacaaccagttaccccaaataccctctggtttgccagagtctttgacagaacttagtctaattcaaaacaatatatacaacataactaaagagggcatttcaagacttataaacttgaaaaatctctatttggcctggaactgctattttaacaaagtttgcgagaaaactaacatagaagatggagtatttgaaacgctgacaaatttggagttgctatcactatctttcaattctctttcacacgtgccacccaaactgccaagctccctacgcaaactttttctgagcaacacccagatcaaatacattagtgaagaagatttcaagggattgataaatttaacattactagatttaagcgggaactgtccgaggtgcttcaatgccccatttccatgcgtgccttgtgatggtggtgcttcaattaatatagatcgttttgcttttcaaaacttgacccaacttcgatacctaaacctctctagcacttccctcaggaagattaatgctgcctggtttaaaaatatgcctcatctgaaggtgctggatcttgaattcaactatttagtgggagaaatagcctctggggcatttttaacgatgctgccccgcttagaaatacttgacttgtcttttaactatataaaggggagttatccacagcatattaatatttccagaaacttctctaaacttttgtctctacgggcattgcatttaagaggttatgtgttccaggaactcagagaagatgatttccagcccctgatgcagcttccaaacttatcgactatcaacttgggtattaattttattaagcaaatcgatttcaaacttttccaaaatttctccaatctggaaattatttacttgtcagaaaacagaatatcaccgttggtaaaagatacccggcagagttatgcaaatagttcctcttttcaacgtcatatccggaaacgacgctcaacagattttgagtttgacccacattcgaacttttatcatttcacccgtcctttaataaagccacaatgtgctgcttatggaaaagccttagatttaagcctcaacagtattttcttcattgggccaaaccaatttgaaaatcttcctgacattgcctgtttaaatctgtctgcaaatagcaatgctcaagtgttaagtggaactgaattttcagccattcctcatgtcaaatatttggatttgacaaacaatagactagactttgataatgctagtgctcttactgaattgtccgacttggaagttctagatctcagctataattcacactatttcagaatagcaggcgtaacacatcatctagaatttattcaaaatttcacaaatctaaaagttttaaacttgagccacaacaacatttatactttaacagataagtataacctggaaagcaagtccctggtagaattagttttcagtggcaatcgccttgacattttgtggaatgatgatgacaacaggtatatctccattttcaaaggtctcaagaatctgacacgtctggatttatcccttaataggctgaagcacatcccaaatgaagcattccttaatttgccagcgagtctcactgaactacatataaatgataatatgttaaagttttttaactggacattactccagcagtttcctcgtctcgagttgcttgacttacgtggaaacaaactactctttttaactgatagcctatctgactttacatcttcccttcggacactgctgctgagtcataacaggatttcccacctaccctctggctttctttctgaagtcagtagtctgaagcacctcgatttaagttccaatctgctaaaaacaatcaacaaatccgcacttgaaactaagaccaccaccaaattatctatgttggaactacacggaaacccctttgaatgcacctgtgacattggagatttccgaagatggatggatgaacatctgaatgtcaaaattcccagactggtagatgtcatttgtgccagtcctggggatcaaagagggaagagtattgtgagtctggagctaacaacttgtgtttcagatgtcactgcagtgatattatttttcttcacgttctttatcaccaccatggttatgttggctgccctggctcaccatttgttttactgggatgtttggtttatatataatgtgtgtttagctaaggtaaaaggctacaggtctctttccacatcccaaactttctatgatgcttacatttcttatgacaccaaagatgcctctgttactgactgggtgataaatgagctgcgctaccaccttgaagagagccgagacaaaaacgttctcctttgtctagaggagagggattgggatccgggattggccatcatcgacaacctcatgcagagcatcaaccaaagcaagaaaacagtatttgttttaaccaaaaaatatgcaaaaagctggaactttaaaacagctttttacttggctttgcagaggctaatggatgagaacatggatgtgattatatttatcctgctggagccagtgttacagcattctcagtatttgaggctacggcagcggatctgtaagagctccatcctccagtggcctgacaacccgaaggcagaaggcttgttttggcaaactctgagaaatgtggtcttgactgaaaatgattcacggtataacaatatgtatgtcgattccattaagcaatactaactgacgttaagtcatgatttcgcgccataataaagatgcaaaggaatgacatttctgtattagttatctattgctatgtaacaaattatcccaaaacttagtggtttaaaacaacacatttgctggcccacagtttttgagggtcaggagtccaggcccagcataactgggtcctctgctcagggtgtctcagaggctgcaatgtaggtgttcaccagagacataggcatcactggggtcacactcatgtggttgttttctggattcaattcctcctgggctattggccaaaggctatactcatgtaagccatgcgagcctctcccacaaggcagcttgcttcatcagagctagcaaaaaagagaggttgctagcaagatgaagtcacaatcttttgtaatcgaatcaaaaaagtgatatctcatcactttggccatattctatttgttagaagtaaaccacaggtcccaccagctccatgggagtgaccacctcagtccagggaaaacagctgaagaccaagatggtgagctctgattgcttcagttggtcatcaactattttcccttgactgctgtcctgggatggcctgctatcttgatgatagattgtgaatatcaggaggcagggatcactgtggaccatcttagcagttgacctaacacatcttcttttcaatatctaagaacttttgccactgtgactaatggtcctaatattaagctgttgtttatatttatcatatatctatggctacatggttatattatgctgtggttgcgttcggttttatttacagttgcttttacaaatatttgctgtaacatttgacttctaaggtttagatgccatttaagaactgagatggatagcttttaaagcatcttttacttcttaccattttttaaaagtatgcagctaaattcgaagcttttggtctatattgttaattgccattgctgtaaatcttaaaatgaatgaataaaaatgtttcattttacaaaaaaaaaaaaaaaa

SEQ ID NO: 2301 - DNA, 1563 bp, Homo sapiens
ccgcagcggactgccctttcccaagatggcgtcgaagataggttcgagacggtggatgttgcagctgatcatgcagttgggttcggtgctgctcacacgctgccccttttggggctgcttcagccagctcatgctgtacgctgagagggctgaggcacgccggaagcccgacatcccagtgccttacctgtatttcgacatgggggcagccgtgctgtgcgctagtttcatgtcctttggcgtgaagcggcgctggttcgcgctgggggccgcactccaattggccattagcacctacgccgcctacatcgggggctacgtccactacggggactggctgaaggtccgtatgtactcgcgcacagttgccatcatcggcggctttcttgtgttggccagcggtgctggggagctgtaccgccggaaacctcgcagccgctccctgcagtccaccggccaggtgttcctgggtatctacctcatctgtgtggcctactcactgcagcacagcaaggaggaccggctggcgtatctgaaccatctcccaggaggggagctgatgatccagctgttcttcgtgctgtatggcatcctggccctggcctttctgtcaggctactacgtgaccctcgctgcccagatcctggctgtactgctgccccctgtcatgctgctcattgatggcaatgttgcttactggcacaacacgcggcgtgttgagttctggaaccagatgaagctccttggagagagtgtgggcatcttcggaactgctgtcatcctggccactgatggctgagttttatggcaagaggctgagatgggcacagggagccactgagggtcaccctgccttcctccttgctggcccagctgctgtttatttatgctttttggtctgtttgtttgatcttttgcttttttaaaattgttttttgcagttaagaggcagctcatttgtccaaatttctgggctcagcgcttgggagggcaggagccctggcactaatgctgtacaggtttttttcctgttaggagagctgaggccagctgcccactgagtctcctgtccctgagaagggagtatggcagggctgggatgcggctactgagagtgggagagtgggagacagaggaaggaagatggagattggaagtgagcaaatgtgaaaaattcctctttgaacctggcagatgcagctaggctctgcagtgctgtttggagactgtgagagggagtgtgtgtgttgacacatgtggatcaggcccaggaagggcacaggggctgagcactacagaagtcacatgggttctcagggtatgccaggggcagaaacagtaccggctctctgtcactcaccttgagagtagagcagaccctgttctgctctgggctgtgaaggggtggagcaggcagtggccagctttgcccttcctgctgtctctgtttctagctccatggttggcctggtgggggtggagttccctcccaaacaccagaccacacagtcctccaaaaataaacattttatatagacaaaaaaaaaaaaaaaaaaaaaaaaa

SEQ ID NO: 2302 - DNA, 1635 bp, Homo sapiens
tttcccgcgggcgggccggggcggggcactgaagggggcggtccaggaccctgacttgtctcgcggttactgggccggcgcgagcacgcgaggctcgggggcggcacggggcggggtttagcctgtggtgggcgctgcgggtgtttgcaggaggttgcagtactcgctgggctgaggtcgtctcgggtgaggaggtcgcgccggaagtggctctagccgtggcgcttcggcgtagtaaggagcctgcaacagagttttgttgtttagggggcgcggcaccgcaccgctcccttcaccttgcagcagccatggcgaaaggcagagtcgccgaacgatcgcagttgggcgctcaccacacgacccccgtgggggacggggcagcggggacgcggggtctcgcggcgcctggcagcagagaccaccagaaggaaaaatcctgggtagaagctggatcagcaagaatgtcactccttatattggtgtccattttcttatctgcagcttttgttatgtttttggtatataaaaattttcctcagcttagtgaagaagaaagagtgaatatgaaggttcccagagatatggatgatgccaaggctctaggaaaagttttatccaaatacaaggacaccttttatgttcaagtacttgtagcttattttgctacatatattttcttgcaaacatttgctattccaggctctatatttctcagtatactctcagggtttctttatccctttccactagccttatttcttgtttgtttgtgttctggacttggtgcctctttctgttatatgctttcctatttagttgggagaccagttgtatacaaatacctaacagagaaagcagtaaaatggtcacagcaggttgaacgtcatagagaacatctcattaactacattatatttttgagaataacaccatttctgcctaattggtttattaatatcacatctcctgtgataaacgtgccattgaaagttttttttattggtacttttctaggtgtcgcacctccttcttttgtagccattaaggcaggaacaacactgtatcaacttacaacagcaggagaagctgtttcctggaactcaatatttattctgatgatcttggctgttctttctattctgccagccatcttccaaaaaaaactaaagcagaaatttgagtaaaaataatcatctgatttttagttttgctgtcatcaccatctcaggattaacagctgcgactttaggtggggtatattttcttctcctaagagaatagacagtttttccagattcatcatcattgactgtcaagaaaggacccttcagcaaggctgtaccctcaatgcagttgatggcctgtcttcacggatttacagacttggcctgatgcccatgtaaattcaagctttggcttgtggtaacaaccacaagaagacaagcatctgtggtgcggaggcaagcaggctaactaggagttgacaagctaagaaagtgaaactgttctttcttagttaactgtctttctctggagctctgttattttgagtataatatttccatgacacttagtaaatgcaagctaaaatgtaataataataaattgtattggagaaacctaaaaaaaaaaaaa

SEQ ID NO: 2303 - DNA, 1592 bp, Homo sapiens
tacggctgcgagaagacgacagaaggggattaagagggagggcggggacaactgggtcttttgcggctgcagcgggcttgtaggtgtccggctttgctggcccagcaagcctgataagcatgaagctcttatctttggtggctgtggtcgggtgtttgctggtgcccccagctgaagccaacaagagttctgaagatatccggtgcaaatgcatctgtccaccttatagaaacatcagtgggcacatttacaaccagaatgtatcccagaaggactgcaactgcctgcacgtggtggagcccatgccagtgcctggccatgacgtggaggcctactgcctgctgtgcgagtgcaggtacgaggagcgcagcaccaccaccatcaaggtcatcattgtcatctacctgtccgtggtgggtgccctgttgctctacatggccttcctgatgctggtggaccctctgatccgaaagccggatgcatatactgagcaactgcacaatgaggaggagaatgaggatgctcgctctatggcagcagctgctgcatccctcgggggaccccgagcaaacacagtcctggagcgtgtggaaggtgcccagcagcggtggaagctgcaggtgcaggagcagcggaagacagtcttcgatcggcacaagatgctcagctagatgggctggtgtggttgggtcaaggccccaacaccatggctgccagcttccaggctggacaaagcagggggctacttctcccttccctcggttccagtcttccctttaaaagcctgtggcatttttcctccttctccctaactttagaaatgttgtacttggctattttgattagggaagagggatgtggtctctgatctccgttgtcttcttgggtctttggggttgaagggagggggaaggcaggccagaagggaatggagacattcgaggcggcctcaggagtggatgcgatctgtctctcctggctccactcttgccgccttccagctctgagtcttgggaatgttgttacccttggaagataaagctgggtcttcaggaactcagtgtctgggaggaaagcatggcccagcattcagcatgtgttcctttctgcagtggttctttatcaccacctccctcccagccccagcgcctcagccccagccccagctccagccctgaggacagctctgatgggagagctgggccccctgagcccactgggtcttcagggtgcactggaagctggtgttcgctgtcccctgtgcacttctcgcactggggcatggagtgcccatgcatactctgctgccggtcccctcacctgcacttgaggggtctgggcagtccctcctctccccagtgtccacagtcactgagccagacggtcggttggaacatgagactcgaggctgagcgtggatctgaacaccacagcccctgtacttgggttgcctcttgtccctgaacttcgttgtaccagtgcatggagagaaaattttgtcctcttgtcttagagttgtgtgtaaatcaaggaagccatcattaaattgttttatttctctcaaaaaaaaaaaaaaaaaaaaaaaaaaaaaa

SEQ ID NO: 2304 - DNA, 4163 bp, Homo sapiens
gagtcacgtgggtccccccggttccggcgcggttgaggccttcggtggtgaacgagtctccagcaccatgtctggtttgtctggcccaccagcccggcgcggcccttttccgttagcgttgctgcttttgttcctgctcggccccagattggtccttgccatctccttccatctgcccattaactctcgcaagtgcctccgtgaggagattcacaaggacctgctagtgactggcgcgtacgagatctccgaccagtctgggggcgctggcggcctgcgcagccacctcaagatcacagattctgctggccatattctctactccaaagaggatgcaaccaaggggaaatttgcctttaccactgaagattatgacatgtttgaagtgtgttttgagagcaagggaacagggcggatacctgaccaactcgtgatcctagacatgaagcatggagtggaggcgaaaaattacgaagagattgcaaaagttgagaagctcaaaccattagaggtagagctgcgacgcctagaagacctttcagaatctattgttaatgattttgcctacatgaagaagagagaagaggagatgcgtgataccaacgagtcaacaaacactcgggtcctatacttcagcatcttttcaatgttctgtctcattggactagctacctggcaggtcttctacctgcgacgcttcttcaaggccaagaaattgattgagtaatgaatgaggcatattctcctcccaccttgtacctcagccagcagaacatcgctgggacgtgcctggcctaaggcatcctaccaacagcaccatcaaggcacgttggagctttcttgccagaactgatctcttttggtgtgggaggacatggggtaccacctacacccaacaagtcaatgagggacttctttttaatttggtaggattttgactggttttgcaacaataggtctattattagagtcacctatgacaaaaaataggggttacctagataatgccaaagtcagcatttgtcctgggttcccttgtgtgatctgtttggactatgttttcttttcttctcccacttgctcagcagcttgggcttccattctagttcttttaccaagatttttgtgtgaccatgttgacttcatttggattgccctctttcaatttccttgtgaaaacacccttaactttctctttacccttagctgaaatgtttacatagcttctggtgatatcttttcatgattttatatctcttaaaatggtgatggatgtgacacctcataaaagtgagctttgaactgtagataactcttaaagaaaatgtcattttagacaattaaaatatttgtgctcaactgcttgaacttttttcgtgtatgtgtatttaattctatgcaatattatcacatgtgtagattcatgtgaccaccatcacaagagacagaacagttctgtcacatggatcccttgcactgcccttttacagccgcagccacatccctttcttataccctcaccccaacctgtggctaccactgttctgtcctccatctctgtaattttgtcatttcaagaatgttgtatgaatggaatcatacagaatgtaatcttacgaggctgatcttttttcattcagcataattcccttgaaatccatccaagttgttgcatgtatgaatagtttcttcctttttttcttttaaaaatgttttatatatttagggggtataagtacagatttcttacatgcatatattgcatcgtggtgaagtgggggcagttccttttgattgctgagtagtattccatggtatggatgtaccacagtttgcttaaccattcacccactaaaggacataagagttgttttcagttttttgccctaataaagctgctgtgaacattcatgtacaggtttttatgtgaacatacattttcattttctgggataaatgctcaaaagggcaactgttgggttgtatggtaaacacatatatttttgtaagaaactaccctactctttttccagagtggctctactttttacatacagccactcatacaattcagacagcaatgtatgattgatccagtttcttcacatcctcaccagcatttggtattactactattttttatcttaaccattcacatagatgtgtgtaatgataccacatgtggttttaatttgcatttccaatggctaatgatgttgagtatctttttgtgtgctaatttgccatctatgtatcctcttcggtgaaatgtcttcatgtcttttgtctattttctatttaggtcatttgttctttttactattgagttttgagaggttttttatatatcctagataaaattcctctgttagatatgtggttgcttgaatttttaacataacttctaccaaggaaaaataagtaaaatttccaacccttgcatggccagtcacttacttaattcctgtccttcagtgttccatctagagaattaagagatatgatgtataaaatagacatcgagggccattaagagagtaaatacttaaaaatacatgttatgaaagcaaagccaataatcactgtaggagtatgagttgcctaagggccaaaactaatgtaaataagagaaagtgtggatataaatgaccattgtttataaacagttatgaaaaatgctgtgacttgaaatctttcccacatctcccaagaaagtaggtaggagtttatcctttccgtaatctctttttaaccctgctgactattacagggcttgtttaatcacagtggcaagaattacatgtatcttacagtaaagaaacagaatactggaatcgttagagaaccctgatgtgttgacctggataaagtacaaaggtggaagagggaatgagttatgctgttaaaatctcaggctattctgttaatgttcctgctactatgaacccaaactttttttttcccccttttgactccttgtgtcttcctctcctgtggcataaaagtagttctgtcgttaacttgtacaacattgccatctgctgttgagaattggtaggtactgcttctgagaacctggctgcagatccttagcataggcagcaaatgttgagaaagtctatctgtagtattacatatactaagttacagaggatgcatccaagtagagaaaataatatgtgggttaagatacatccttaaacttttttttttttggggggggggggacggagtcttgctgcaacgcccaggctggagtgcaatggcactatctcagctcgctgcaaccttcacctcctgggttcaagcaattctcctgcctcagcctcctgagtagctgggaatataggtgcacaccaccatgcctggctaatttttgtattttcagtagaagcagagtttcaccatattggccaggttggtctcgaactcctgacctcaagtgatctgcctgcctcagcctcccaaagtgctgggattacacgcgtgagccaccacacccagcctccatctttaaacttttaaatgtgaaatttctatcatgtaccgttagcctaacaagattttctttcctatttctgactggtgcctttcccctttttaggagcaacgaaagctactctcttagttatgttcttgtgatgtgacaaaatgtcaagaagataggagaagagaatattttatttcgttgatgcttttgttcccaagtgtgaccctaaacttaagctttgtaggagttgacattctttcatgtcccttccctttactcatgccgaaactatcaactgggacattttgtgcttttggtttaaaagttaattgatattatactttggttttatctaaaaagtaaatgtatttgcctttgacaaaagactgacacaagagcaaataagctttaaaatcgggtgttatgtgctttcctccatttttgagcatattatccaaaatggtctgtataatataaatgagaatgatgcagtttaagtaagccttgttataccattgtcatggacccctgtcataaagccatttcttggtttgtttgggaaagaggcatatgggatttatacagattcacttgtaaatgttggattggggatttttgtgtaaattttctcaaataaaggctagcagaaaccataaaaaaaaaaaaaaaaaaa

SEQ ID NO: 2305 - DNA, 4446 bp, Homo sapiens
tgccttgaccaggacttgggactttgcgaaaggatcgcggggcccggagaggtgttggagagcacaatggctgaacaagtccttcctcaggctttgtatttgagcaatatgcggaaagctgtgaagatacgggagagaactccagaagacatttttaaacctactaatgggatcattcatcattttaaaaccatgcaccgatacacactggaaatgttcagaacttgccagttttgtcctcagtttcgggagatcatccacaaagccctcatcgacagaaacatccaggccaccctggaaagccagaagaaactcaactggtgtcgagaagtccggaagcttgtggcgctgaaaacgaacggtgacggcaattgcctcatgcatgccacttctcagtacatgtggggcgttcaggacacagacttggtactgaggaaggcgctgttcagcacgctcaaggaaacagacacacgcaactttaaattccgctggcaactggagtctctcaaatctcaggaatttgttgaaacggggctttgctatgatactcggaactggaatgatgaatgggacaatcttatcaaaatggcttccacagacacacccatggcccgaagtggacttcagtacaactcactggaagaaatacacatatttgtcctttgcaacatcctcagaaggccaatcattgtcatttcagacaaaatgctaagaagtttggaatcaggttccaatttcgcccctttgaaagtgggtggaatttacttgcctctccactggcctgcccaggaatgctacagataccccattgttctcggctatgacagccatcattttgtacccttggtgaccctgaaggacagtgggcctgaaatccgagctgttccacttgttaacagagaccggggaagatttgaagacttaaaagttcactttttgacagatcctgaaaatgagatgaaggagaagctcttaaaagagtacttaatggtgatagaaatccccgtccaaggctgggaccatggcacaactcatctcatcaatgccgcaaagttggatgaagctaacttaccaaaagaaatcaatctggtagatgattactttgaacttgttcagcatgagtacaagaaatggcaggaaaacagcgagcaggggaggagagaggggcacgcccagaatcccatggaaccttccgtgccccagctttctctcatggatgtaaaatgtgaaacgcccaactgccccttcttcatgtctgtgaacacccagcctttatgccatgagtgctcagagaggcggcaaaagaatcaaaacaaactcccaaagctgaactccaagccgggccctgaggggctccctggcatggcgctcggggcctctcggggagaagcctatgagcccttggcgtggaaccctgaggagtccactggggggcctcattcggccccaccgacagcacccagcccttttctgttcagtgagaccactgccatgaagtgcaggagccccggctgccccttcacactgaatgtgcagcacaacggattttgtgaacgttgccacaacgcccggcaacttcacgccagccacgccccagaccacacaaggcacttggatcccgggaagtgccaagcctgcctccaggatgttaccaggacatttaatgggatctgcagtacttgcttcaaaaggactacagcagaggcctcctccagcctcagcaccagcctccctccttcctgtcaccagcgttccaagtcagatccctcgcggctcgtccggagcccctccccgcattcttgccacagagctggaaacgacgcccctgctggctgcctgtctcaagctgcacggactcctggggacaggacggggacgagcaagtgcagaaaagccggctgcgtgtattttgggactccagaaaacaagggcttttgcacactgtgtttcatcgagtacagagaaaacaaacattttgctgctgcctcagggaaagtcagtcccacagcgtccaggttccagaacaccattccgtgcctggggagggaatgcggcacccttggaagcaccatgtttgaaggatactgccagaagtgtttcattgaagctcagaatcagagatttcatgaggccaaaaggacagaagagcaactgagatcgagccagcgcagagatgtgcctcgaaccacacaaagcacctcaaggcccaagtgcgcccgggcctcctgcaagaacatcctggcctgccgcagcgaggagctctgcatggagtgtcagcatcccaaccagaggatgggccctggggcccaccggggtgagcctgcccccgaagacccccccaagcagcgttgccgggcccccgcctgtgatcattttggcaatgccaagtgcaacggctactgcaacgaatgctttcagttcaagcagatgtatggctaaccggaaacaggtgggtcacctcctgcaagaagtggggcctcgagctgtcagtcatcatggtgctatcctctgaacccctcagctgccactgcaacagtgggcttaagggtgtctgagcaggagaggaaagataagctcttcgtggtgcccacgatgctcaggtttggtaacccgggagtgttcccaggtggccttagaaagcaaagcttgtaactggcaagggatgatgtcagattcagcccaaggttcctcctctcctaccaagcaggaggccaggaacttctttggacttggaaggtgtgcggggactggccgaggcccctgcaccctgcgcatcaggactgcttcatcgtcttggctgagaaagggaaaagacacacaagtcgcgtgggttggagaagccagagccattccacctcccctcccccagcatctctcagagatgtgaagccagatcctcatggcagcgaggccctctgcaagaagctcaaggaagctcagggaaaatggacgtattcagagagtgtttgtagttcatggtttttccctacctgcccggttcctttcctgaggacccggcagaaatgcagaaccatccatggactgtgattctgaggctgctgagactgaacatgttcacattgacagaaaaacaagctgctctttataatatgcaccttttaaaaaattagaatattttactgggaagacgtgtaactctttgggttattactgtctttacttctaaagaagttagcttgaactgaggagtaaaagtgtgtacatatataatatacccttacattatgtatgagggatttttttaaattatattgaaatgctgccctagaagtacaataggaaggctaaataataataacctgttttctggttgttgttggggcatgagcttgtgtatacactgcttgcataaactcaaccagctgcctttttaaagggagctctagtcctttttgtgtaattcactttatttattttattacaaacttcaagattatttaagtgaagatatttcttcagctctggggaaaatgccacagtgttctcctgagagaacatccttgctttgagtcaggctgtgggcaagttcctgaccacagggagtaaattggcctctttgatacacttttgcttgcctccccaggaaagaaggaattgcatccaaggtatacatacatattcatcgatgtttcgtgcttctccttatgaaactccagctatgtaataaaaaactatactctgtgttctgttaatgcctctgagtgtcctacctccttggagatgagatagggaaggagcagggatgagactggcaatggtcacagggaaagatgtggccttttgtgatggttttattttctgttaacactgtgtcctgggggggctgggaagtcccctgcatcccatggtaccctggtattgggacagcaaaagccagtaaccatgagtatgaggaaatctctttctgttgctggcttacagtttctctgtgtgctttgtggttgctgtcatatttgctctagaagaaaaaaaaaaaaggaggggaaatgcattttccccagagataaaggctgccattttgggggtctgtacttatggcctgaaaatatttgtgatccataactctacacagcctttactcatactattaggcacactttccccttagagccccctaagtttttcccagacgaatctttataatttctttccaaagataccaaataaacttcagtgttttcatctaattctcttaaagttgatatcttaatattttgtgttgatcattatttccattcttaatgtgaaaaaaagtaattatttatacttattataaaaagtatttgaaatttgcacatttaattgtccctaatagaaagccacctattctttgttggatttcttcaagtttttctaaataaatgtaacttttcacaagagtcaacattaaaaaataaattatttaagaacaaaaaaaaaaaaaaa

SEQ ID NO: 2306 - DNA, 3133 bp, Homo sapiens
ccgctgaggccgcggcgcccgccagcctgtcccgcgccatggccccgcgcgcccggcggcgccgcccgctgttcgcgctgctgctgctctgcgcgctgctcgcccggctgcaggtggctttgcagatcgctcctccatgtaccagtgagaagcattatgagcatctgggacggtgctgtaacaaatgtgaaccaggaaagtacatgtcttctaaatgcactactacctctgacagtgtatgtctgccctgtggcccggatgaatacttggatagctggaatgaagaagataaatgcttgctgcataaagtttgtgatacaggcaaggccctggtggccgtggtcgccggcaacagcacgaccccccggcgctgcgcgtgcacggctgggtaccactggagccaggactgcgagtgctgccgccgcaacaccgagtgcgcgccgggcctgggcgcccagcacccgttgcagctcaacaaggacacagtgtgcaaaccttgccttgcaggctacttctctgatgccttttcctccacggacaaatgcagaccctggaccaactgtaccttccttggaaagagagtagaacatcatgggacagagaaatccgatgcggtttgcagttcttctctgccagctagaaaaccaccaaatgaaccccatgtttacttgcccggtttaataattctgcttctcttcgcgtctgtggccctggtggctgccatcatctttggcgtttgctataggaaaaaagggaaagcactcacagctaatttgtggcactggatcaatgaggcttgtggccgcctaagtggagataaggagtcctcaggtgacagttgtgtcagtacacacacggcaaactttggtcagcagggagcatgtgaaggtgtcttactgctgactctggaggagaagacatttccagaagatatgtgctacccagatcaaggtggtgtctgtcagggcacatgtgtaggaggtggtccctacgcacaaggcgaagatgccaggatgctctcattggtcagcaagaccgagatagaggaagacagcttcagacagatgcccacagaagatgaatacatggacaggccctcccagcccacagaccagttactgttcctcactgagcctggaagcaaatccacacctcctttctctgaacccctggaggtgggggagaatgacagtttaagccagtgcttcacggggacacagagcacagtgggttcagaaagctgcaactgcactgagcccctgtgcaggactgattggactcccatgtcctctgaaaactacttgcaaaaagaggtggacagtggccattgcccgcactgggcagccagccccagccccaactgggcagatgtctgcacaggctgccggaaccctcctggggaggactgtgaacccctcgtgggttccccaaaacgtggacccttgccccagtgcgcctatggcatgggccttccccctgaagaagaagccagcaggacggaggccagagaccagcccgaggatggggctgatgggaggctcccaagctcagcgagggcaggtgccgggtctggaagctcccctggtggccagtcccctgcatctggaaatgtgactggaaacagtaactccacgttcatctccagcgggcaggtgatgaacttcaagggcgacatcatcgtggtctacgtcagccagacctcgcaggagggcgcggcggcggctgcggagcccatgggccgcccggtgcaggaggagaccctggcgcgccgagactccttcgcggggaacggcccgcgcttcccggacccgtgcggcggccccgaggggctgcgggagccggagaaggcctcgaggccggtgcaggagcaaggcggggccaaggcttgagcgccccccatggctgggagcccgaagctcggagccagggctcgcgagggcagcaccgcagcctctgccccagccccggccacccagggatcgatcggtacagtcgaggaagaccacccggcattctctgcccactttgccttccaggaaatgggcttttcaggaagtgaattgatgaggactgtccccatgcccacggatgctcagcagcccgccgcactggggcagatgtctcccctgccactcctcaaactcgcagcagtaatttgtggcactatgacagctatttttatgactatcctgttctgtgggggggggggtctgttttccccccatatttgtattccttttcataacttttcttgatatctttcctccctcttttttaatgtaaaggttttctcaaaaattctcctaaaggtgagggtctctttcttttctcttttccttttttttttctttttttggcaacctggctctggcccaggctagagtgcagtggtgcgattatagcccggtgcagcctctaactcctgggctcaagcaatccaagtgatcctcccacctcaaccttcggagtagctgggatcacagctgcaggccacgcccagcttcctccccccgactccccccccagagacacggtcccaccatgttacccagcctggtctcaaactccccagctaaagcagtcctccagcctcggcctcccaaagtactgggattacaggcgtgagcccccacgctggcctgctttacgtattttcttttgtgcccctgctcacagtgttttagagatggctttcccagtgtgtgttcattgtaaacacttttgggaaagggctaaacatgtgaggcctggagatagttgctaagttgctaggaacatgtggtgggactttcatattctgaaaaatgttctatattctcatttttctaaaagaaagaaaaaaggaaacccgatttatttctcctgaatctttttaagtttgtgtcgttccttaagcagaactaagctcagtatgtgaccttacccgctaggtggttaatttatccatgctggcagaggcactcaggtacttggtaagcaaatttctaaaactccaagttgctgcagcttggcattcttcttattctagaggtctctctggaaaagatggagaaaatgaacaggacatggggctcctggaaagaaagggcccgggaagttcaaggaagaataaagttgaaattttaaaaaaaaa

SEQ ID NO: 2307 - DNA, 5909 bp, Homo sapiens
tccataatcctgaaacaccatcagccgcatcatctcgggcagcgaaaggacggatgccgcacccggtatcccgacctcgatatacgtcataccgtaagcaaacgccatcaaaatcagcgaagtcgccgcataagcgggcggggcggaaaaaggatgcctgcccaccctgaagagcttatagccgcagcgcgggcagaacgccgcctcccccctgtccaattgcggcacatccgcgcggcagccgcattccgggcaatctaccgtatgcggcggcagggcttcgtcgcggcagttgccgcgaaggctgtgggggatattttcggcaaacggcttcatcgggaaagtggcaaatataagtggcggcattataaaggaaaaaagcaacgcacccaatcaggatgcaaaaccggcaggttcggcagtatgaacaaacccttggtgtccggcaaaaatattttttgagcggctgtccgccgactgccgaacccatttgataaaatcccgattctgtaaagaatagtaaaatacctgcttaaaaacatcacgcaaatgatattttttccaaaaatatgtgataataaatttcgtttatgattctttattatttttatagtggattaacaaaaatcaggacaaggcggcgaagccgcagacagtacaaatagtacggaaccgattcacttggtgcttcagcaccttagagaatcgttctctttgagctaaggcgaggcaacgccgtaccggtttttgttaatccactatatatgcgggcaagtgcggattttgcccgccccgcatccttatcccttaccgacaaaggaaaagctatgagcgaaaccgaaaatcaagccctgacgtttgccaaacgcttgaaagcagataccacggcggttcacgacagcgtggataatctcgttatgtctgtcgaaccgtttgtcagcaaagaaaactacattaaatttttgaaactccaatccgttttccacaaggccgtcgaccacatctataaagatgccgaattaaacaaagccattcccgagctggaatacatggcgcgatacgatgccgtaacgcaagacttgaaagacttgggcgaagagccttacaaattcgacaaagaattgccacacgaaaccggcaacaaagcaatcggctggctttattgcgccgaaggttctaatttgggtgcggcgtttttgttcaagcacgcgcaaaaactcgattacaacggcgaacacggcgcgcgccacctcgccccccatcccgacggtcgcggtaaacactggcgcgccttcgtcgagcatctgaacgccttgaacttgactcccgaagccgaagcggaagccatccaaggcgcgcgcgaagcctttgcattctacaaagtcgtgttgcgcgaaactttcggcttggcagccgatgccgaagcccccgagggtatgatgccgcacaggcattgatatattttacggtttcgcctcggctcgtgaagcggaaccgtattttctgccgcgtatgacggcatttttcaaaccatcagatataaataattatcatattttttattaaaaatatgccataggagataattatgacgattcctttcaaaccaagcctgcttgcaatggcatccatcctcgccctttccgcctgtatttcagggggagggggtacacctgtagtcaaatcctcagaaacgccgtcaaataaagttaccccccccgctgatacggtaagccctgccccgggtgctgatactgcaggcactgcttcgggcggggatggaagagaatccaaaacagaaataccgcctaaagatacgcagggagaaggggaaaccgcgcaggcaggcgctgatggcggagtgcaaaatgatgcgccccaacatgtggaaacttcaacagaatcaacacctgaaggaacagtggaatcagagtcaacaccaaaagaagcaggagaagaaatcaaaccggcacctaaagaagatacatcagaaggaaaagaagctaaagaaactgatccaacacaaccttcttcaacttcagaatctcaagatggtacggaagaaaacgctgtaagcgaagatacggggatgcaggcaagtcctccttctgaaacaaccgaacatactgagcctgcgatgaatgccgaagatgcaaacccgccgtcgaaagccgaaaattctgatgaggtggggcaaggcgggatgcaggctgatgaagcaagtggcaggcaggatgcggaagaggggttgcaaggcgacgacccgaccgcccatcctccccaagaccaaaccccccaaagtgctgccgataaccaacctaaaacaggcgtgtttggcgagaaatattttgacggtacgggagaaatcacgacgttggtgattggtggggaaactattgatttgacaaaagctgatgagccagtatcacgtaaaaatcaccccggtttgatgagtgatagtgattttgagaaggtaatggtttctcaagggcaatatcagcatctgatttatggggcggctaaattacaagacggtacatacaccctttttgtacaaggtaagccgacagaaaatttgccgacaagaatgatggctaaatatcaaggtaaggtgctgcattttgttggaaaatataaggataattggtttaataatagtgcgtatagagccgcaggaacatttacggcagatgttgatttctcacggcaaaccttaacaggaaaaattgataccaaagatccttcaggtatggggatgcaagaatttactgcaagtatcgatggaagtggatttcaaggtaagtggaaatcggataatgatcaaggcgatatttccgggaaattttatggtcaagatggcgcggaaatggcaggcagatacgactataaaaatcaagataatagaaaagacggcttcggcgtatttgcaggcaaaaaagaagcagatgcccgttgatatttatcctatgtttcacagtcgggaacagttcgggtttccttcggacagggtatcggtcaacactttgatgtgttgacctgcctgcagaagcgatcctaattgaaccatcatctgtattactgatttgatttatggactatgccgtctgaaaaatgtttcagacggcattttttggttgccgatatgttaacggacgacattggcgcgcataaccacgcggacgtggaacgagcctgcctgacaatcgtattgtccgccttgcagcggctgcttgtcgaagtagctctggaagccggtaacactgcgtccgcaaaggtggcggcagatgccgcattgtgtttataatgccgtgtcagacgtttgatttatgggaaaataatgatgcttaccaatcaggaagtaaccggtgtcaaactgggataccgcaaagccgttttacaagagctggcccgggatttcgggggcagtgtgcacagtatcgtattggatgcggtggatggtcatatagaacgcttgaaagccaaacaagcctacgataagcgggcgatgcaggcttttcaggattatcgggaaacaggattgcatattacgcttaatgagtttgcggactgggtggagggcttgggtggcgatgaatcgaaggatatgcccgaatgccgcaagtgaagttgatatagtggattaaatttaaaccagtacagcgttgcctcgccttgccgtactatctgtactgtctgcggcttcgtcgccttgtcctgatttaaatttaatccactataattacacgccccgctcaatctgatttggtcaggatttataattttttgaatgatttgggtgcggaacgtcaggcaaatacagtgatgcggctgcttaaaaattcttttgtttctacacaaggcagcccgagtaatgggaaaccttatgatttgtcggtggcgggggaaactttgcaaaatgtaagggaagtaatcgtgccttatggcaaaagcggttatagctatttgttttggcacgataaatcaggtaagcaaatattgattttgacggtgaggcatttccgtgaaaatgcctaccgcctgagctttccttttttataacgtcatttggtttggcggctttcccttgtgcggggcaatgcgtttcggctttgttgcggcacgttcggataaaccgccttcaagaacataaccggactgccgctttgattccgttccgcaggcgggatgtttgaacggtgcagatatggaagtatggagtgccccgatttgaatctgccgcacaataaggcaaggggattaaaaatgccgtctgaaaaatgtttcagacggcattttttgattgccgatatgttaacggacgacattggcgcgcatgaccacgcggacgtggaacgaacctgcctgacagtcgtattgtccgccttgcagcggctgcttgtcgaagtagctgtggaagccggtaacgctgcgtccgccgagtttgccggcggtctgctggaatttgcgggcggcattgatcagggcgcgttcgcaggcctcggagtcggatttgcctacgccgtttgctgcctgccgtgtaaccagattcctgccgtttgcgaccggtacgcccccgccgccgaagctgacgggaatcccggattccaatacgccggtggcggtggccgcatttattgccgcctgaccgttgctgcaacggtaaatgatgtttttgccgcctcctgcggtatctccacggatgactttgcatgattctccggccggtgtgccggcggatgccgtgtgtacgtttttaggcgcgcggccggattagcaggctgccagcatcagggcggcggcagagagtatgaagatttttttcatgtcgggtatccttgcgtgctgtgggaaatcattggcattgtacagtaagattcaacaaaatgccgtctgaaaacggggttcggacggcattgtggctcaggggttcaatacgcgtgcgatgagggctttttctttgccccgcatattggggattttgacctggatgccgttgccgggtgcaacatcgacaggctggccttttcgggccatttgttccaatttgatggtttggttgccgctcgggtggatgatttcgagcgaatcgccgatggcaaagcggtttttaacttccaccgttgcccaaccttcagcgtcgatttcggtaacgtggccgacatattggctttgtttggcgatggagtggccggtcaggtagttttgatagtcttgggtttggtggcgttcgaggaagccgctggtgtagccgcggttggcgaggccttcgagttcgctcaacaggctgtaatcaaacggacggcctgcaacggcatcgtcaatcgctttgcggtaggattgagccacgcgtgcaacgtagtagagcgacttggtacggccttcgactttgaggctgtccacgccgattttggcgagtttctcaaccacttcaatactgcgaaggtctttggagttcatgatgtaggtgccgtgttcgtcttccataatcggcatcatctcgcccgggcggttggactcttcaatcaggaaaactttgtcggcgtagggatggcgtttttgaccgttgatgccttcaaagttttggttggcttcttcttgggctttttcaaagttgaaaccttgcagaagctgggcatcgcccgcatcgctttccgtagcgttgtggactttgtagtcccaacggcaggagttggtgcaggtgccttggttggggtcgcggtggttgaagtagccggagagtaggcaacggccggagtaggcgatgcacaatgcgccgtgaatgaagacttcgagttcgatgtcggggcattgttggcggatttcggcgatttcttccatactcaattcgcgcgacaggatgatgcgttcgacgccgatattctgccagaatttcacgccccagtagttgg

SEQ ID NO: 2308 - DNA, 3662 bp, Homo sapiens
gccaccacgtgtgtccctgcgcccggtggccaccgactcagtccctcgccgaccagtctgggcagcggaggagggtggttggcagtggctggaagcttcgctatgggaagttgttcctttgctctctcgcgcccagtcctcctccctggttctcctcagccgctgtcggaggagagcacccggagacgcgggctgcagtcgcggcggcttctccccgcctgggcggccgcgccgctgggcaggtgctgagcgcccctagagcctcccttgccgcctccctcctctgcccggccgcagcagtgcacatggggtgttggaggtagatgggctcccggcccgggaggcggcggtggatgcggcgctgggcagaagcagccgccgattccagctgccccgcgcgccccgggcgcccctgcgagtccccggttcagccatggggacctctccgagcagcagcaccgccctcgcctcctgcagccgcatcgcccgccgagccacagccacgatgatcgcgggctcccttctcctgcttggattccttagcaccaccacagctcagccagaacagaaggcctcgaatctcattggcacataccgccatgttgaccgtgccaccggccaggtgctaacctgtgacaagtgtccagcaggaacctatgtctctgagcattgtaccaacacaagcctgcgcgtctgcagcagttgccctgtggggacctttaccaggcatgagaatggcatagagaaatgccatgactgtagtcagccatgcccatggccaatgattgagaaattaccttgtgctgccttgactgaccgagaatgcacttgcccacctggcatgttccagtctaacgctacctgtgccccccatacggtgtgtcctgtgggttggggtgtgcggaagaaagggacagagactgaggatgtgcggtgtaagcagtgtgctcggggtaccttctcagatgtgccttctagtgtgatgaaatgcaaagcatacacagactgtctgagtcagaacctggtggtgatcaagccggggaccaaggagacagacaacgtctgtggcacactcccgtccttctccagctccacctcaccttcccctggcacagccatctttccacgccctgagcacatggaaacccatgaagtcccttcctccacttatgttcccaaaggcatgaactcaacagaatccaactcttctgcctctgttagaccaaaggtactgagtagcatccaggaagggacagtccctgacaacacaagctcagcaagggggaaggaagacgtgaacaagaccctcccaaaccttcaggtagtcaaccaccagcaaggcccccaccacagacacatcctgaagctgctgccgtccatggaggccactgggggcgagaagtccagcacgcccatcaagggccccaagaggggacatcctagacagaacctacacaagcattttgacatcaatgagcatttgccctggatgattgtgcttttcctgctgctggtgcttgtggtgattgtggtgtgcagtatccggaaaagctcgaggactctgaaaaaggggccccggcaggatcccagtgccattgtggaaaaggcagggctgaagaaatccatgactccaacccagaaccgggagaaatggatctactactgcaatggccatggtatcgatatcctgaagcttgtagcagcccaagtgggaagccagtggaaagatatctatcagtttctttgcaatgccagtgagagggaggttgctgctttctccaatgggtacacagccgaccacgagcgggcctacgcagctctgcagcactggaccatccggggccccgaggccagcctcgcccagctaattagcgccctgcgccagcaccggagaaacgatgttgtggagaagattcgtgggctgatggaagacaccacccagctggaaactgacaaactagctctcccgatgagccccagcccgcttagcccgagccccatccccagccccaacgcgaaacttgagaattccgctctcctgacggtggagccttccccacaggacaagaacaagggcttcttcgtggatgagtcggagccccttctccgctgtgactctacatccagcggctcctccgcgctgagcaggaacggttcctttattaccaaagaaaagaaggacacagtgttgcggcaggtacgcctggacccctgtgacttgcagcctatctttgatgacatgctccactttctaaatcctgaggagctgcgggtgattgaagagattccccaggctgaggacaaactagaccggctattcgaaattattggagtcaagagccaggaagccagccagaccctcctggactctgtttatagccatcttcctgacctgctgtagaacatagggatactgcattctggaaattactcaatttagtggcagggtggttttttaattttcttctgtttctgatttttgttgtttggggtgtgtgtgtgtgtttgtgtgtgtgtgtgtgtgtgtgtgtgtgtgtgtgtttaacagagaatatggccagtgcttgagttctttctccttctctctctctcttttttttttaaataactcttctgggaagttggtttataagcctttgccaggtgtaactgttgtgaaatacccaccactaaagttttttaagttccatattttctccattttgccttcttatgtattttcaagattattctgtgcactttaaatttacttaacttaccataaatgcagtgtgacttttcccacacactggattgtgaggctcttaacttcttaaaagtataatggcatcttgtgaatcctataagcagtctttatgtctcttaacattcacacctactttttaaaaacaaatattattactatttttattattgtttgtcctttataaattttcttaaagattaagaaaatttaagaccccattgagttactgtaatgcaattcaactttgagttatcttttaaatatgtcttgtatagttcatattcatggctgaaacttgaccacactattgctgattgtatggttttcacctggacaccgtgtagaatgcttgattacttgtactcttcttatgctaatatgctctgggctggagaaatgaaatcctcaagccatcaggatttgctatttaagtggcttgacaactgggccaccaaagaacttgaacttcaccttttaggatttgagctgttctggaacacattgctgcactttggaaagtcaaaatcaagtgccagtggcgccctttccatagagaatttgcccagctttgctttaaaagatgtcttgttttttatatacacataatcaataggtccaatctgctctcaaggccttggtcctggtgggattccttcaccaattactttaattaaaaatggctgcaactgtaagaacccttgtctgatatatttgcaactatgctcccatttacaaatgtaccttctaatgctcagttgccaggttccaatgcaaaggtggcgtggactccctttgtgtgggtggggtttgtgggtagtggtgaaggaccgatatcagaaaaatgccttcaagtgtactaatttattaataaacattaggtgtttgttaaaaaaaaaaaaaaaaaaaaaaaaaaaaa

SEQ ID NO: 2309 - DNA, 10529 bp, Homo sapiens
gtccagggagccagcctaggatggggaaggctcaccagaagtggatgcaaagagtgctggagatgagctcattctatttgcctaggaaagaaaaacgtccagaaacctggccttcctcctcttggccgaggccctccaggaaagccaggcagaccctgctcctgctctgaccccctggagaagtgatatgtagaaaagaggagatgggctttggcccagaggacagcagcgttaggctagtgagcagttcccagtcggttcaaggttgctaggctcagcgaactgcaagtccctgttcgacaagtttcttcctaaaggtccccagttcctcatgattcttctgagggtctcatccaccctcccagggcctgcagtcagctagccaccccactgccccatgcctgcagtgaagacatttaccacaacctggaaatggctggtgacagaaaagtcctcagggccacagcactctctgcggtgggaattcaggtgccttgcctgatggtgacaaggctggttttgcataaacagctctctgaatcacacccagatgtggcttctgacttgagtggacccccatgaagagctgcagagggggctgggaaaagacaagagaatggagaaaatgaggagaaaggaaactacagagtgagatagagaacagatctgacaggtgtgaccacagcagtgtgacatttatgaacagtgtggaaacaacggcaaagcccctgaattaaaaacttcctggggaaataagccactccacatatcggttgctgaggaaagagtggaggaggctgttgacccgtgtgtgtccccatgactcaaagagggaaaagtctagctgtttccaatatcccgaaatcagtcttgctgggagaactgggaaaataaaaaagagatgacccccgtaggaagctacctttaatcccaagtgcccaaggctaggagagaagatgctccaggcgatccaggacaccagtgactgacacagccagaggtgggaaaggggaggataaagatggcacaaaagtgaggagtgagcaagggtctgagagggaaggccatgtgggcagtaggtggcacccacatcagagactgacatgaggattaaaggagagcataggtgatcggtcagagtgtgacagaagagaggcagctctacaccccttgcttgcaattctgagcattctgtagcaaactcgtttggccatcaaaccagacctcaattgagacaaggctatttaagcttcctcccagttggtgtaaatattcaatagttttgctgcagaaatgttgcgtttgattatgagactaccccaactccccaagggtgttttgtggtgctggtttctgtataaacctgaaaaattctgaattccaaaacttatctgacccccaaagtttcagataagagcttgtggacctgtgctcaattctggttctccttccttctttcaactgttgtctgtgaaaggagggatgcaggtatgggagacaggagtcctgcgaattcgtctgtaaactgtggacgggggggtgggtggggggggggtaacgtgggcacctttgtgcacaagtgcatgaataggaggggtgagcaactgtgtgtccatcacctttttgtcaaagaagcaggagtcagtgggctacgtgcttcatgagcaggagaggcggaaactaaggaaggctcatgtgttggaggaagcatgtttgaagagcagcaggtctcacagagtttgctctttaatactctccccagcacacggaaggggaagggggtggaggttgctgctatgagagagaaaaaaaaaacagccacaatagagattctgccttcaaaggttggcttgccacctgaagcagccactgcccagggggtgcaaagaagagacagcagcgcccagcttggaggtgctaactccagaggccagcatcagcaactgggcacagaaaggagccgcctgggcagggaccatggcacggccacatccctggtggctgtgcgttctggggaccctggtggggctctcagctactccagcccccaagagctgcccagagaggcactactgggctcagggaaagctgtgctgccagatgtgtgagccaggtaagagggggccttggtaagggccaggtgagtggcgaaagagagaggactggggttaatacagtaaataggcgcagggtgagactgagctcaagcaaggagggaaatcctgcagctgtggggaggcaccaccttgaagagggcagagaaccagcccttctcaggccttgatcccttaccctctcctcccaggaacattcctcgtgaaggactgtgaccagcatagaaaggctgctcagtgtgatccttgcataccgggggtctccttctctcctgaccaccacacccggccccactgtgagagctgtcggcactgtaactctggtgaggtgggcaagggtgtgtaggtggggacgatggacaagcatctgggggagcaaggctggtgacgggtttgggggtgcaaggaggatgacggggccaaagctttggccttcttcaaggctcacagcaagtggagccaatgctgggaaatgcggcaccctaggtggggcatgaattaacgtgggcagacatctagtattccaggaaagggataaatagaatttgagggattggtgagaacgggtctatggataggatcaagacaataaaatgagagaagtggctctatgaccccagatttcgggcaagcaacccccaaccaataaactgactgtgttcccagagtgcacatgtgcaggttggccattgggaatttggaatacatctttctaaggaaataacaaagcaacccaataggtaacaacctttttttgcacaaaagccaatttgagaaaatgagtatgtatgtagcctgtgtttttattttatagttccaaaaaaaaaggttttttttaaactaagaagtataatatctgcagttgtgcttatgaatgctgttattatttctccatcttcgctacaatttcagaaactacggccagtatacactagaatagcaggctttaaagtggcccctttgaacaaatgttctctagcaagacactttttagaaccaggtaactgtaactattaaactacctacttgcaaaacgtgtttggtgtcactgggtctcttggtactgggttttgttttgtttagtttagagacaaggtctagctctgtcacccaggctggagtgcagtggtgcaatcatagctccccacagccttgaactcctgggctcaagcaatcttctagtctcagcctctgaaagtgccaggattacaggtgtgagctgtagtgcctggtcccgtaaaaacaaaaacaaaaaccaacaccagatgtggtggctcatgcctataatcccagcacttgggaggccaaggcagaagggtatttgcatattttgtagagacttgagcccaggagcttgagaccagctgggcaacatagtgagaccttgtctctaaaaaaattggctggtcatggtagtgcacctgcagtcccagctacttgggaggctgagatgggaagatcacttgagcccaagaggtccccaagaggtccaggctgctcacatcactgcactccagcctgggtaacagagcaaaaccctttttcacacacacacacacacacacacaaaaagccagagcagtggctcacacttgtaatcccagcactttaggaggccaaggcaggcggatcccttgagcccaggagtttaagaacaccctgggcaacatggcaaaaccctgtctctactaaaaatacaaaaagttagccaggcgtggtggcacgaacctgtagtcccagctactcagaaggctgaagtgagaagatcacttgagtccaggaagtggaggctgcagtgagccgtgactgtaccactgcactccagcttgggagacagagtgagcagagtgagaccctgtttccaaaaaaaaaaagaaaacaaaagcttttccattgcaaatcaaccaaaaaggaacgtctttaatacacaagaaatattcttcagtctacttaacttaaaaatgtaactgtaatagatgcttttctcttgacagcggccccggcagggttggaacttttcctagtcaaaacccccctactcactctgcagacccttcctgaaggtcttcgccccatactgagcccatcttcagtcccttcacttgttccaaactagcccaatccatgacccttctctgggagctcagccaatagatcccaaagtaccacagcagcacctggctgcagaaggacccccgggaaatgcagtcaggggtgagaagatgggtgggctgaatgagctcggccctctctgggccttagtgctggcatctatgagatgaggacatgcctgaagtcagcctggaattttgagcccaggttatacctggtaaatagaactcccaggtctccggatactcaccactaaaacaatagcacctcattgtttttgttttgttttgttttgttttgtaattaattatactttaagttctagggtacatgtacacaatgtgcaggtttgttacataggtatacatgtgccatgttggtgtgctgcacccattaactcatcatttacattaggtatatctcctaatgctatccctcctccctccccacaccccacgacaggccccagtgtgtgatgttccccttcctgtgtccaagtgttctcattgttcaattcccacctacgagtgagaacacattgtttttaaccctccccagcagcttctttaacccctccatttcccttttggcggagacccttgtcatcactcctctctaccaccagtgctctcccctcctgcactgtcccaggcttcctcattcttcccttgcaggtccttatccaacatggctcacaattcctgggaagccacaaggaaaccaaattctagtagcaactcagagtcagcattcattagcaggtcacagggccataaggatgccaagaaggaatttgtccctctccttgtcctgacaaaaggcataagtagaagaaaattgttaggtttggttatgacctttgacattctctctttgacatcctccctttctgcacccctcttccacctgtcagggcacctagggctccccgggtccccacaagtgtctgccctaaggcccaccaggctttcttgcagcctgtcccacatctgggtgtcactgccttcctctgaatcaccctcctctcaaaccagccgccagcgagcccagcccagcccagctagtgccctaccacacccgcccccaggataattaacacccagccacccagcatcggacctctacacttgagcaaaatgtatattttaaaggcaaattctcacgcctgtaatcccagcactttgggaggccaaggcgggcggatcacgaggtcaggagattgagaccatcctggctaacacagtgaaaccccatctctactaaaaatacaaaaaattagccaggtgtggtggcacacacctgtaatcccagctactagggaggctgaggcaggagaatcacttgaactcaggaggcggaggttgcactgagccgagatcgtgccactgcactccaacctgggcgacaaagcaagactctgtcaaaaaacaaacaaacaaaataaaggctaagtaactgtaatcaagtaactatttattatttatttattttagtgtatccacaggttgtgcagccatcaacactatctaattctataacattttcgttaccccagagaaacttgtaccccttagcaatgactccccatttcttccccccaaccaaccccagccccagccccagcccctgggaatccctaatatactttgttttgttttttgttggtggtgtttgagacaggatctcactctgtcacccaggctggagcgcagtatcatgatctcagctcactgtaacctccacctcccgggctcaagcgatcctcccacctcagcctccccagtagcttgggcctacaggtgtgcaccaccacacccagctaatttttgtattttttgtagagacggggtttcaccatgttggccaggctggtctcaaactcctgagctcaagcaatccacccacctcaacctcccaaagtgctgggattacaggcgtaagccactgcacctggctattttctttctttcttttcttttttttttttttttgagacggagtttcactctgttgcccaggctggagtgcagtggcgtgatctcggctcactgcaacttccacctcccgggttcaagcaattccctgcctcacccggctattttatatttgttgatctgctgctggttatgcctgtgagccaaatttgtacaaattcttaagctttacaatcatgcgtgcctctctgtacgtatattatactttaattaaaagttattaaagtattggggccgagcacagtggctcacgcctgtaatcccaacactttgggaggctgaggctggtgcatcacctgaggtcaggagtttaataccagcctggccaatacagtaaaaccccgtctctactaaaaatacaaaaaattagccgggtgtggtggcacacacctgtaatcccagctacttgggaggctgaggcaggagaattgcttgaacccgggaggcagaggttgcaacgagccaaggtcacgccattgcactccagcctcggcaacaagagcgagactccatctcaaaaaaataaataaaaaataaaaaatgtatcagggagtacaagagaaagtcatataagctctttctacttttcatggtttctatgtctgaacccatgaatcttccttctgaaaggtccaactttcttctttaataacaataataatggcaaaggcattgggggaccgtgagcaaagggcaggcctttgcaggggtgggaatggaaagggaagcacgtccctagaggtgggcctgggatgggggttgggggatgaagcaagtggaccttgaaggtctccacaggtctgagtgtcctatgctccctgggcctctcttcccccaggtcttctcgttcgcaactgcaccatcactgccaatgctgagtgtgcctgtcgcaatggctggcagtgcagggacaaggagtgcaccgagtgtgatcctcttccaaacccttcgctgaccgctcggtcgtctcaggccctgagcccacaccctcagcccacccacttaccttatgtcagtggtaagttccaggcaactctctgtgccatcacgtggggtagcggtgataccccaaccagtactccccactcctacccctagataaggtcagcctgtttctgccttcccatcccatccagcacctctcaggccttcagatgtgccctatggggtcccctgctgctactcattctgtctctgtttttccagagatgctggaggccaggacagctgggcacatgcagactctggctgacttcaggcagctgcctgcccggactctctctacccactggccacgtgagttttctccttaatccccaccgctagagagaatgcatacacgaggggccaggagggaagccagacagaaagctcctaggattagggataagaggaggggaaaaagcagagtccactgtttaggagaggagttggccaacggtggcgggtgggatagaataaggtgggggaaaggggagaggcaaggtgacaggagggctgggctgagggagccaagggctagaccctcccctaacccctgtgtgtcccctcctattacagcccaaagatccctgtgcagctccgattttattcgcatccttgtgatcttctctggaatgttccttgttttcaccctggccggggccctgttcctccatcaacgaaggaaatatagatcaagtaagagacagaacacaggcctccggtcctgcccctgcaccacaccccactggctcaaccccactgcccacgcctggaatctcactgaaacccaccagctccacttcaccagccttggtcctaccccttctctccccttagctggcgtgctcctgacacccctcccccaagcgcacccgcctctacccatctccttctcccgtctccccctgcccccactgctggccaagactcatcggatctccttctgcagacaaaggagaaagtcctgtggagcctgcagagccttgtcgttacagctgccccagggaggaggagggcagcaccatccccatccaggaggattaccgaaaaccggagcctgcctgctccccctgagccagcacctgcgggagctgcactacagccctggcctccacccccaccccgccgaccatccaagggagagtgagacctggcagccacaactgcagtcccatcctcttgtcagggccctttcctgtgtacacgtgacagagtgccttttcgagactggcagggacgaggacaaatatggatgaggtggagagtgggaagcaggagcccagccagctgcgcctgcgctgcaggagggcgggggctctggttgtaaaacacacttcctgctgcgaaagacccacatgctacaagacgggcaaaataaagtgacagatgaccaccctgcagctctccagcttcctctctgaaatcccagtcccaaaatccagtttcctggccgcctcctggctcaggtcaggatctggcagaggaggtttctcagccggttatgttggggcctgcttaagggcgggggtgagaaaggtccccaggctactgtggatcctgtgtctgacttcagatccccttttcccacagttatagctccacttttttgggacaggtggggagcaaaagggtgcagaggtcaggtcttgaaatcaccaggggatttccgggtgaggtgggtggtgagaaaggaaacagcaagcagggctctggcagctgctgcagacggcttcacacagggacgcgggctgccatcttgctctaagtgaaagtgaaagaaaagtcggcagcagagggaacagggaagaaacctaaaggctgcaggctgccaggtgtgcttggagagcccccttcttccgccgggcctcgcaagcagcgtaggactgtggagaagggcggtgggcaaggagggaactcgagagcagcctccatgggcacacaggagggctggtgcctgctgctctgcctggctctatctggagcagcagaaaccagtgagtctgggagtcggggagagctggctgggagaagagctactgaagccccagggtgccaccctccccgagattccagaagagcaaaggggccggggatgaccccatcgccttctaagcccaacaggggaaaggctcagcggctggcaaaggaaggaaccaatagtgtgtgtggagggagggtggggactccacagggaaaatgctaaagaggggctgcctctgtggctgtggtcaggagccactgtcctacagagagggcactggcctgggagctgacacttcagaagaggaaaggactccccaggtgaggaaatcacttggaaggtgaccttgaaggcgggggaggggaaggctacccgaaatgggagaaagcagtgcaggctgtcagtgccccagcaacagtaactgtccagtctcctctctctgcggtggcacttgcttgttttctgagaattcctttgactgaaaagatagtcttttattcaacagttggaaatgcaagcataaactcctctgagcaaggcaaatccaggactttaactctcaccaagaagtatttgcctggactagcaggtgctctccagaaagctggtttggggatgacgggagaatagagggacacagaaacagctaggatcttggatggcaacttttaccctttgatgactccacagcttgagggcgggggcaggaagcaagtgtggagtagctttctggggaaggcggtgctcaccccagcctttgtctgcagagccccacccagcagaggggcagtggcgggcagtggacgtggtcctagactgcttcctggcgaaggacggtgcgcaccgtggagctctcgccagcagtgaggacagggcaagggcctcccttgtgctgaagcaggtgccagtgctggacgatggctccctggaggacttcaccgatttccaagggggcacactggcccaagatgacccacctattatctttgaggcctcaggtaaaagccttccacctgtgtccttggtcctcccgggctccctccaccaggacagcccaggtcccgattacagccacacatactgcctcccgttggccctggtgttctcacgctaatttgccctctgtgtgtgccctgcttctccccagtggacctggtccagattccccaggccgaggccttgctccatgctgactgcagtgggaaggaggtgacctgtgagatctcccgctactttctccagatgacagagaccactgttaagacagcagcttggttcatggccaacgtgcaggtctctggagggggacctagcatctccttggtgatgaagactcccagggtc

SEQ ID NO: 2310 - DNA, 1841 bp, Homo sapiens
atccctcgggtcccgggatgggggggcggtgaggcaggcacagccccccgcccccatggccgcccgtcggagccagaggcggagggggcgccggggggagccgggcaccgccctgctggtcccgctcgcgctgggcctgggcctggcgctggcctgcctcggcctcctgctggccgtggtcagtttggggagccgggcatcgctgtccgcccaggagcctgcccaggaggagctggtggcagaggaggaccaggacccgtcggaactgaatccccagacagaagaaagccaggatcctgcgcctttcctgaaccgactagttcggcctcgcagaagtgcacctaaaggccggaaaacacgggctcgaagagcgatcgcagcccattatgaagttcatccacgacctggacaggacggagcgcaggcaggtgtggacgggacagtgagtggctgggaggaagccagaatcaacagctccagccctctgcgctacaaccgccagatcggggagtttatagtcacccgggctgggctctactacctgtactgtcagagttccgatgccctggaagcctgggagaatggggagagatcccggaaaaggagagcagtgctcacccaaaaacagaagaagcagcactctgtcctgcacctggttcccattaacgccacctccaaggatgactccgatgtgacagaggtgatgtggcaaccagctcttaggcgtgggagaggcctacaggcccaaggatatggtgtccgaatccaggatgctggagtttatctgctgtatagccaggtcctgtttcaagacgtgactttcaccatgggtcaggtggtgtctcgagaaggccaaggaaggcaggagactctattccgatgtataagaagtatgccctcccacccggaccgggcctacaacagctgctatagcgcaggtgtcttccatttacaccaaggggatattctgagtgtcataattccccgggcaagggcgaaacttaacctctctccacatggaaccttcctggggtttgtgaaactgtgattgtgttataaaaagtggctcccagcttggaagaccagggtgggtacatactggagacagccaagagctgagtatataaaggagagggaatgtgcaggaacagaggcgtcttcctgggtttggctccccgttcctcacttttcccttttcattcccaccccctagactttgattttacggatatcttgcttctgttccccatggagctccgaattcttgcgtgtgtgtagatgaggggcgggggacgggcgccaggcattgtccagacctggtcggggcccactggaagcatccagaacagcaccaccatctagcggccgctcgagggaagcacccgccggttggccgaagtccacgaagccgccctctgctagggaaaacccctggttctccatgccacacctctctccaggtgccctctgcctcttcaccccacaagaagccttatcctacgtccttctctccatctatcggaccccagtttccatcactatctccagagatgtagctattatgcgcccgtctacagggggtgcccgacgatgacggtgccttcgcagtcaaattactcttcgggtcccaaggtttggctttcacgcgctccattgccccggcgtggcaggccattccaagcccttccgggctggaactggtgtcggaggagcctcgggtgtatcgtacgccctggtgttggtgttgcctcactcctctgagctcttctttctgatcaagccctgcttaaagttaaataaaatagaatgaatgataccccggcaaaaaaaaaaaaaaaaaa

SEQ ID NO: 2311 - DNA, 2095 bp, Homo sapiens
cctgtgtgctggggaggaatcccgcagtggccggggggcttgaggccgctgctttgtctcttcgtccagagccttatgtaagagcttttctcgggaaacaggaagtcctgcttgccaatttcagcacagggagtagtgcaggccttattccaacacacccggcccagccttaaccccagaactcagccagtttcttgcttccgtgcccctggttctcctccccatcgagcccacccctcctttcccaccttcagtcacccctagtgaactgccccagcgatctctgctgtgcttgaccccgagggtcttccaccctcgccctgaccctggacactgcccagcttggccccccatcctgctcctggcacaatgccctctagccagccaaccttccctcccccaaccctggggccgccccagggttcctgcgcactgcctgttcctcctgggtgtcactggcagccctgtccttcctagagggactggaacctaattctcctgaggctgagggagggtggagggtctcaaggcaacgctggccccacgacggagtgccaggagcactaacagtacccttagcttgctttcctcctccctcctttttattttcaagttcctttttatttctccttgcgtaacaaccttcttcccttctgcaccactgcccgtacccttacccgccccgccacctccttgctaccccactcttgaaaccacagctgttggcagggtccccagctcatgccagcctcatctcctttcttgctagcccccaaagggcctccaggcaacatggggggcccagtcagagagccggcactctcagttgccctctggttgagttggggggcagctctgggggccgtggcttgtgccatggctctgctgacccaacaaacagagctgcagagcctcaggagagaggtgagccggctgcaggggacaggaggcccctcccagaatggggaagggtatccctggcagagtctcccggagcagagttccgatgccctggaagcctgggagaatggggagagatcccggaaaaggagagcagtgctcacccaaaaacagaagaagcagcactctgtcctgcacctggttcccattaacgccacctccaaggatgactccgatgtgacagaggtgatgtggcaaccagctcttaggcgtgggagaggcctacaggcccaaggatatggtgtccgaatccaggatgctggagtttatctgctgtatagccaggtcctgtttcaagacgtgactttcaccatgggtcaggtggtgtctcgagaaggccaaggaaggcaggagactctattccgatgtataagaagtatgccctcccacccggaccgggcctacaacagctgctatagcgcaggtgtcttccatttacaccaaggggatattctgagtgtcataattccccgggcaagggcgaaacttaacctctctccacatggaaccttcctgggactttgattttacggatatcttgcttctgttccccatggagctccgaattcttgcgtgtgtgtagatgaggggcgggggacgggcgccaggcattgtccagacctggtcggggcccactggaagcatccagaacagcaccaccatctagcggccgctcgagggaagcacccgccggttggccgaagtccacgaagccgccctctgctagggaaaacccctggttctccatgccacacctctctccaggtgccctctgcctcttcaccccacaagaagccttatcctacgtccttctctccatctatcggaccccagtttccatcactatctccagagatgtagctattatgcgcccgtctacagggggtgcccgacgatgacggtgccttcgcagtcaaattactcttcgggtcccaaggtttggctttcacgcgctccattgccccggcgtggcaggccattccaagcccttccgggctggaactggtgtcggaggagcctcgggtgtatcgtacgccctggtgttggtgttgcctcactcctctgagctcttctttctgatcaagccctgcttaaagttaaataaaatagaatgaatgataaaaaaaaaaaaaaa

SEQ ID NO: 2312 - DNA, 2228 bp, Homo sapiens
cctgtgtgctggggaggaatcccgcagtggccggggggcttgaggccgctgctttgtctcttcgtccagagccttatgtaagagcttttctcgggaaacaggaagtcctgcttgccaatttcagcacagggagtagtgcaggccttattccaacacacccggcccagccttaaccccagaactcagccagtttcttgcttccgtgcccctggttctcctccccatcgagcccacccctcctttcccaccttcagtcacccctagtgaactgccccagcgatctctgctgtgcttgaccccgagggtcttccaccctcgccctgaccctggacactgcccagcttggccccccatcctgctcctggcacaatgccctctagccagccaaccttccctcccccaaccctggggccgccccagggttcctgcgcactgcctgttcctcctgggtgtcactggcagccctgtccttcctagagggactggaacctaattctcctgaggctgagggagggtggagggtctcaaggcaacgctggccccacgacggagtgccaggagcactaacagtacccttagcttgctttcctcctccctcctttttattttcaagttcctttttatttctccttgcgtaacaaccttcttcccttctgcaccactgcccgtacccttacccgccccgccacctccttgctaccccactcttgaaaccacagctgttggcagggtccccagctcatgccagcctcatctcctttcttgctagcccccaaagggcctccaggcaacatggggggcccagtcagagagccggcactctcagttgccctctggttgagttggggggcagctctgggggccgtggcttgtgccatggctctgctgacccaacaaacagagctgcagagcctcaggagagaggtgagccggctgcaggggacaggaggcccctcccagaatggggaagggtatccctggcagagtctcccggagcagagttccgatgccctggaagcctgggagaatggggagagatcccggaaaaggagagcagtgctcacccaaaaacagaagaatgactccgatgtgacagaggtgatgtggcaaccagctcttaggcgtgggagaggcctacaggcccaaggatatggtgtccgaatccaggatgctggagtttatctgctgtatagccaggtcctgtttcaagacgtgactttcaccatgggtcaggtggtgtctcgagaaggccaaggaaggcaggagactctattccgatgtataagaagtatgccctcccacccggaccgggcctacaacagctgctatagcgcaggtgtcttccatttacaccaaggggatattctgagtgtcataattccccgggcaagggcgaaacttaacctctctccacatggaaccttcctggggtttgtgaaactgtgattgtgttataaaaagtggctcccagcttggaagaccagggtgggtacatactggagacagccaagagctgagtatataaaggagagggaatgtgcaggaacagaggcgtcttcctgggtttggctccccgttcctcacttttcccttttcattcccaccccctagactttgattttacggatatcttgcttctgttccccatggagctccgaattcttgcgtgtgtgtagatgaggggcgggggacgggcgccaggcattgtccagacctggtcggggcccactggaagcatccagaacagcaccaccatctagcggccgctcgagggaagcacccgccggttggccgaagtccacgaagccgccctctgctagggaaaacccctggttctccatgccacacctctctccaggtgccctctgcctcttcaccccacaagaagccttatcctacgtccttctctccatctatcggaccccagtttccatcactatctccagagatgtagctattatgcgcccgtctacagggggtgcccgacgatgacggtgccttcgcagtcaaattactcttcgggtcccaaggtttggctttcacgcgctccattgccccggcgtggcaggccattccaagcccttccgggctggaactggtgtcggaggagcctcgggtgtatcgtacgccctggtgttggtgttgcctcactcctctgagctcttctttctgatcaagccctgcttaaagttaaataaaatagaatgaatgataaaaaaaaaaaaaaa

SEQ ID NO: 2313 - DNA, 1645 bp, Homo sapiens
agtctctcgtcatggaatacgcctctgacgcttcactggaccccgaagccccgtggcctcccgcgccccgcgctcgcgcctgccgcgtactgccttgggccctggtcgcggggctgctgctgctgctgctgctcgctgccgcctgcgccgtcttcctcgcctgcccctgggccgtgtccggggctcgcgcctcgcccggctccgcggccagcccgagactccgcgagggtcccgagctttcgcccgacgatcccgccggcctcttggacctgcggcagggcatgtttgcgcagctggtggcccaaaatgttctgctgatcgatgggcccctgagctggtacagtgacccaggcctggcaggcgtgtccctgacggggggcctgagctacaaagaggacacgaaggagctggtggtggccaaggctggagtctactatgtcttctttcaactagagctgcggcgcgtggtggccggcgagggctcaggctccgtttcacttgcgctgcacctgcagccactgcgctctgctgctggggccgccgccctggctttgaccgtggacctgccacccgcctcctccgaggctcggaactcggccttcggtttccagggccgcttgctgcacctgagtgccggccagcgcctgggcgtccatcttcacactgaggccagggcacgccatgcctggcagcttacccagggcgccacagtcttgggactcttccgggtgacccccgaaatcccagccggactcccttcaccgaggtcggaataacgcccagcctgggtgcagcccacctggacagagtccgaatcctactccatccttcatggagacccctggtgctgggtccctgctgctttctctacctcaaggggcttggcaggggtccctgctgctgacctccccttgaggaccctcctcacccactccttccccaagttggaccttgatatttattctgagcctgagctcagataatatattatatatattatatatatatatatatttctatttaaagaggatcctgagtttgtgaatggacttttttagaggagttgttttggggggggggtcttcgacattgccgaggctggtcttgaactcctggacttagacgatcctcctgcctcagcctcccaagcaactgggattcatcctttctattaattcattgtacttatttgcctatttgtgtgtattgagcatctgtaatgtgccagcattgtgcccaggctagggggctatagaaacatctagaaatagactgaaagaaaatctgagttatggtaatacgtgaggaatttaaagactcatccccagcctccacctcctgtgtgatacttgggggctagcttttttctttctttcttttttttgagatggtcttgttctgtcaaccaggctagaatgcagcggtgcaatcatgagtcaatgcagcctccagcctcgacctcccgaggctcaggtgatcctcccatctcagcctctcgagtagctgggaccacagttgtgtgccaccacacttggctaactttttaatttttttgcggagacggtattgctatgttgccaaggttgtttacatgccagtacaatttataataaacactcatttttcctcaaaaaaaaaaaaaaaa

SEQ ID NO: 2314 - DNA, 3268 bp, Homo sapiens
atgcttacgtgccttttggcaggtcccctccctgttctggcctgtgttcccctcggcacaaggaaggggctgggtggtctctgtggctcgcctccgctctgaaattccggctttcaaggtggccccaggccttcgacaggggcttccggcgctgggagtgcggcaaggcgccgcgcaggcccgggacggtggccccagggaagtcgctcctagaggggaaggccgccgaagggacgagagacaccgcgggcccccggaaccgcaggcagccggtgtttacctcgctcggtcccaccccaggcggccgcgggcccgcccggagcgcgcggcgcgattgggcgagtggcctgccagtctccggggactttcccaggggtggggcggcccggccaggcccccggcacttcctcgtcctcggcccgggtgccctgcccccgtccaggagccctaggagtgctacggggggccggagccttgcccgggccgctgccccgtccctggattcggggctggacgcagcaagcggggcgctgtgtccccaagctccccgtcctcgggcgggcaccacggcaggggctgagctaccctcatggaagggagaggaccgtaccggatctacgaccctgggggcagcgtgccctcaggagaggcatccgcagcttttgagcgcctagtgaaggagaattcccggctgaaggaaaaaatgcaagggataaagatgttaggggagcttttggaagagtcccagatggaagcgaccaggctccggcagaaggcagaggagctagtgaaggacaacgagctgctcccaccaccttctccctccttgggctccttcgaccccctggctgagctcacaggaaaggactcaaatgtcacagcatctcccacagcccctgcatgccccagtgacaagccagcaccagtccagaagcctccatccagtggcacctcctctgaatttgaagtggtcactcctgaggagcagaattcaccagagagcagcagccatgccaatgcgatggcgctgggccccctgccccgtgaggacggcaacctgatgctgcacctgcagcgcctggagaccacgctgagtgtgtgtgccgaggagccggaccacggccagctcttcacccacctgggccgcatggccctggagttcaaccgactggcatccaaggtgcacaagaatgagcagcgcacctccattctgcagaccctgtgtgagcagcttcggaaggagaacgaggctctgaaggccaagttggataagggcctggaacagcgggatcaggctgccgagaggctgcgggaggaaaatttggagctcaagaagttgttgatgagcaatggcaacaaagagggtgcgtctgggcggccaggctcaccgaagatggaagggacaggcaagaaggcagtggctggacagcagcaggctagtgtgacggcaggtaaggtcccagaggtggtggccttgggcgcagccgagaagaaggtgaagatgctggagcagcagcgcagtgagctgctggaagtgaacaagcagtgggaccagcatttccggtccatgaagcagcagtatgagcagaagatcactgagctgcgtcagaagctggctgatttgcagaagcaggtgactgacctggaggccgagcgggagcagaagcagcgtgactttgaccgcaagctcctcctggccaagtccaagattgaaatggaggagaccgacaaggagcagctgacagcagaggccaaggagctgcgccaaaaggtcaagtacctgcaggatcagctgagcccactcacccgacagcgtgagtaccaggaaaaggagatccagcggctcaacaaggccctggaggaagcactgagcatccaaaccccgccatcatctccaccaacagcatttgggagcccagaaggagcaggggccctcctaaggaaacaggagctggtcacgcagaatgagttgctgaaacagcaggtgaagatcttcgaggaggacttccagagggagcgcagtgatcgtgagcgcatgaatgaggagaaggaagagctgaagaagcaagtggagaagctgcaggcccaggtcaccctgtcaaatgcccagctaaaagcattcaaagatgaggagaaggcaagagaagccctcagacagcagaagaggaaagcaaaggcctcaggagagcgttaccatgtggagccccacccagaacatctctgcggggcctacccctacgcctacccgcccatgccagccatggtgccacaccatggcttcgaggactggtcccagatccgctacccccctccccccatggccatggagcacccgcccccactccccaactcgcgcctcttccatctgccggaatacacctggcgtctaccctgtggaggggttcgaaatccaaatcagagctcccaagtgatggaccctcccacagccaggcctacagaaccagagtctccaaaaaatgaccgtgaggggcctcagtgagaccagattgtgtcatttggctccaccttcatcttgcagagccagctgatctcagattgccaagaaactagaagccacttgcacggtgtggccagagcctcagctggatgagaggctgagatgggtggccagcttgtacaccagtccctgaactgagctgtttacaggactggggaggctccacccagaaggctttcatttgtactctgctgggagtgactgggaaaaactccttccctgctgctgagtggagagaggcctcatccggctttgacccaccatccgttgcagaagcctccaggagcagcaatcctaagagtgggaggcagccaagacccccttccttcaaaacctcccggaagtggtttcaggccctctagttgccatgaccaatttgtgtgtgtgtttaatttttgcttcaagctctgtagcaggacctgccccacgcacacccctacccctctgtgaggagctgtgggaagtgtgggtttgtctccagaacagaagagaatgatggatattctggctctggggccctctccaccaccactcacagtagccttgctgaagccatcacagatgggagaaggccatgccagccacgtccgccgaggggcgccagcctgaagctgccaggccctgaggttcagaccctggaccccatagctggaggcctgtggtgccagaagcccagattagggtggctgtccatccctggatagctatttgcacgaatcatggacataaatccaagttgaagaagatcaa

SEQ ID NO: 2315 - DNA, 8546 bp, Homo sapiens
agattgcaaattcgcggtgactcagtctggtcggctccttgcgctcggcggccgcggcggcagcagcagcagacgctggcggccgggctgccaggagcagttccgccgggtttcactgtccgtgacttccttcggggcacctcaggcagcaaaccaagatggagtatgagtggaaacctgacgagcaagggcttcagcaaatcctgcagctgttgaaggagtcccagtccccagacaccaccatccagagaaccgtgcaacaaaaactggaacaacttaatcagtatccagactttaacaactacttgatttttgttcttacaaaattaaaatctgaagatgaacccacaagatcattgagtggtcttatcttgaagaataatgtgaaagcacactttcagaacttcccaaatggtgtaacagactttattaaaagtgaatgtttaaataatattggtgactcctctcctctgattagagccactgttggtattttgatcacaactatagcctccaagggagaattgcagaattggcctgacctcttaccaaaactctgtagcctgttggattctgaagattataatacctgtgagggagcatttggtgcccttcagaagatttgtgaagattctgctgagattttagacagtgatgttttagatcgtcctctcaacatcatgattcccaaatttttacagttcttcaagcatagtagtccaaaaataaggtctcacgctgttgcatgtgtcaatcagtttatcatcagtaggactcaagctctaatgttgcacattgattcttttattgagaatctctttgcattagctggtgatgaagaaccagaggtacggaaaaatgtgtgccgagcacttgtgatgttgctcgaagttcgaatggatcgcctgcttcctcacatgcataatatagttgagtacatgctacagaggactcaagatcaagatgaaaatgtggctttagaagcctgtgaattttggctaactttagctgaacagccaatatgcaaagatgtactcgtaaggcatcttcctaagttgattcctgtgttagtgaatggcatgaagtactcagacatagatattatcctacttaagggtgatgttgaagaagacgaaacgattcctgatagtgaacaggatatacggccacgttttcaccgatcgaggacggtggctcagcagcatgatgaagatggaattgaagaggaagatgatgatgatgatgaaattgatgatgatgatacaatttctgactggaatctaagaaaatgttctgctgctgccctggatgttcttgcaaatgtgtatcgtgatgaactgctgccacatattttgccccttttgaaagaattactttttcatcatgaatgggttgttaaagaatcaggcattttggttttaggagcaattgctgaaggttgcatgcagggcatgattccatacttgcctgagcttattcctcaccttattcagtgcctctctgataaaaaggctcttgtgcgttccataacatgctggactcttagccgctatgcacactgggtggtcagccagccgccagacacgtacctgaagccattaatgacagaattgctaaagcgcatcctggacagcaacaagagagtacaagaagctgcctgcagtgcctttgctaccctagaagaggaggcttgtacagaacttgttccttaccttgcttatatacttgataccctggtctttgcatttagtaaataccagcataagaacctgctcattctttacgatgccataggaacattagcagattcagtaggacatcatttaaacaaaccagaatatattcagatgctaatgcctccactgatccagaaatggaacatgttaaaggatgaagataaagatctcttccctttacttgagtgcctatcttcagttgccacagcactgcagtctggattccttccgtactgtgaacctgtgtatcagcgttgtgtaaacctagtacagaagactcttgcacaagccatgctaaacaatgctcaaccagatcaatatgaagctccagataaagattttatgatagtggctcttgatttactgagtggcctggctgaaggacttggaggcaacattgaacagctggtagcccgaagtaacatcctgacactaatgtatcagtgcatgcaggataaaatgccagaagttcgacagagttcttttgccctgttaggtgacctcacaaaagcttgctttcagcatgttaagccttgtatagctgatttcatgccaatattgggaaccaacctaaatccagaattcatttcagtctgcaacaatgccacatgggcaattggagaaatctccattcaaatgggtatagagatgcagccttatattcctatggtgttgcaccagcttgtagaaatcattaacagacccaacacaccaaagacgttgttagagaatacagcaataacaattggtcgtcttggttacgtttgtcctcaagaggtggcccccatgctacagcagtttataagaccctggtgcacctctctgagaaacataagagacaatgaggaaaaggattcagcattccgtggaatttgtaccatgatcagtgtgaatcccagtggcgtaatccaagattttatatttttttgtgatgccgttgcatcatggattaacccaaaagatgatctcagagacatgttctgtaagatccttcatggatttaaaaatcaagttggcgatgaaaattggaggcgtttctctgaccagtttcctcttcccttaaaagagcgtcttgcagctttttatggtgtttaatctaatacacttaagctgcagtcccaaaattaggggtccttcagtcttggagactataagggagcctctgcacccagggaaaatgttaccctttacaggggggaagggtaaaccagtagggaatacagtacaatcccaaccctactgggaggggcgggagggaggtgttgccgtcactgtattaagtcgatgttgggaaacgttttaacatctggagcctttgtgggtggaaatatgtctccagttacaactccgcagtggatgtgaagaagcaaaaaaaaaaaaatctattcagtctactcacaaaacagtacattgtggaatattatggggaattgtaccaaaacaagaaccatataaatgatgcctagggacaagaaagaggaacaattctatagcgcacaataaaggaaacctaagaatgggagttacaaatagtaaagaagctttttttttttttttaatttaaagtttttttatgtaagttttcccacatgatggggccttgttttgcatgttgatgaagaactacacaaagaaaactaatatagttaaaagtcagcttgccttcccgtagtagaagcaggttcttggaagttacaatttaaggtaccccaaaaaagttggaaataaaacaaaacaaacataaacaatgaagcaccctgtgaaatgccaaatgagtcactccttttaccttttttggggtgggcagggagggaggaataaatggggttgggcatatcaaactaaagatgacatcttaattttgcattgaacattaatgtagcggatataatttgatgattatacttcattagatttaatttctaggccaagatgttactttttaaagtgcagtttaaggttcaggcatgcattctggctcatagtggttgaaagtaatttaaattagtgggaaagtagcatgcttgcatcacatagagtgagattggtattcatttacctatgttgcgccagtttgtgttgcagtttaccaattcaatatagccctgcatttaaagttcctttttaagatttgtggattttatttttattaagaacatagatatataaagtactgtagtttacaggtaggccttgaaatatcttttttaggatctgttaggaataagattgatattgtattgtgtgtaacctgcacaatgtggaaagctgatatacctgtgcaaaatctttgcctctgtgctgtcagtgtgatgtgctttctgcatggttatatactactagtgattttatcaaaacttctaaaatttaaattacgtggtaaaagatctgtaaaaggctgcataaatgttagttggcacataaagacaattgtagaagttgaaaaatgattgctatatttcaatgtttattcccactcaacatactgccttctaagcttccctttttttgttcaaagcatgatcttaaagatatgtttaagttaatggatgtaatgcagggttcctacactgtattttggcgcatgttggtggccctctgtgccctagatatatgcacacagggtgcaagttaaaagctacagagtgaaagttggtttggatcctcttcatttcatttgtttagcttttctgttatttttctctacttacatgtattcctgtgaataaatccttgttaagttaaccctttacttttccttccatgtgtattttcttatatactgtgaatgtgaaaacctaactggtacacttgatcttgtgttcatatgaaagtgcaagtctttattaatttggattgcctgaacagtgtatcccatgatgatgaaggaaaatggagagatttttctttttaactctgctggtcagagatgaagccacgcctttccatttttcaatgctgcatatttaatctgcaacaaaaatgttaagccataacagcctttttatattttagtttgtcacctttgcattgcagaataaatactgaataaccatttttataagcagttgctcctctttgcatggttctattctctaaaagtgttgaatgatacagccattgcactgaagtttgagctgtgtgcgtgtgaatttatactgtttcaaaaatttcaaatgcatggtagcatgtagaaaggtttttgttactatgtgtgtgtgtgtgttttgttttgttttgttctgttttttaacgttctttcacctttcctctactttggctttgcaaatttcagtctgtagagcctgaaattaaattattttatagtgcctgatatttttaatattataagttggattcaaagggtatacagcattttgttttctagtaccattgcttcactgggagctcaaaatttgcctccctgttagtctttaataactgagtagagtagcttttttattcttagattatagtgatattctgtagtgcttcaaatacttagaattctaatatgagagatagtttaatattctggaatagagagtattttaaattgaaatgaccaaattcgatttaaaacaaacacataacaatcttcagtaaagttatttgaacctgtggttgacaattctgtattgactaaaggcaatattgtcacctgtctcattaaaaattagtttccagttaggcagatgaataacactattaaaaatgcacccagttttgtagtcacttgactttttttttttatttaaatgaaatttaatttgaaaatagaaaataaaattaggtaaatatgactggcaacctgaatttgagttgggattctttgtgtatttttcccccttgaggttattgtttcttcctaatttatatttcagatacatagtgtagaacaggaatttgcagaagccatttaagttatcttttgaggtaagctctgatttagcatttattctgataaaatctaatacatcatgggatatatataaagcaacttaattcttgtggtgtagtcttaatagttttgaatgttgactgaatgtctataaaattgtgagtttgtctttgttacattccagtgtttctgcctcttggcatgcttaaagcacggcttacttcatctgctccttacacactaaaatgctgttagtgtgctcaactacagaaatagccgctgctaagtgatgtagattttctacttgaatatttttatgttgtaggaacctcaggaggtcagtgtttactgttttatatatgccttctttttcctgtttgagcttctctctttgaaggattctaacagaacaaagctgctgatcaacctaagttggaaacagaaagtgtaattaatataacttaaatgcatgtttggcagttccatgttacagtccattagcgagtgaacttagtgccacaggtattcatttattcaggaaagaattttgctttttgtattgtctaatctcttcaatgacttcatactgtgtaaaaaaaaatcactttttaatattttttggttggttatttcccaaataatcaacatgtaaataatcttttaagagccagttctgatgctttacattattgctacttgattttgttatgcaagttagatttcagaagaatagattttaaaacacttaaccaagccattacatcttaaaaacaaaacaagtagcatacattttgtaattaacattgataaacactgtgatttttttggttaagactttttcattgatctgaattgcttaaattgcatatattgtaaaataggatcagatgtatattttaaactaatttcaatggattttcctcttgaaatgctttgtctactcagttataaaatattcagatacaagttttatctcaggtgaatactcttgtattgtttttgctttggtgacatgcttataaagggtcatcctagttacattctttgttttttaagtgtatttcattgagaatctttccatttagtctgatttttttcctaatattctagcaggctggggtggtataaagccctcctgacaagccttttgcctacaggtttacctgaaaatgagctacatatggtcgtcattttcttcaaactctcaaaataggaaagtggaaatttttctcccctatataaaattattctgcctagcagaaatgccagaaataaattaattgcatcttagtctaaatttaagtcctttgccatgaggaaaaagtggttttttgcttcatatggtaaatctatattattcatattgaatgtattaacagataatggtgcaaaagcattcttcccaggggaagagtgtatcatgcataactgcaatttaagtccttcctttgataatacttcaaaacatacacagctttgcttactgaattatttttgcaaataatacaaggaggggaaactaacttgctactagtgttgttaatgaagtataggccttggaacatttaagaaaactggtcttcagatagttaagggcttgggataatttaagtgaaaagtgagatcagtaatgagctgtgttgttaacaatattatctggtaataataccatgcaatatagcgttgtataccaacttagtgcattttatactgtattaaatatggagatacttctaatgcctctctaaaattaaattttacataaaagttagttttattcacctttaggctttccaagtgaattgtgactaattttttcaatcttacatagatctttcacccattagcattacttacgtagataattctttatgcctagttattatacatattaatttttaaggtatacatttaaattacacaattgttcattgtggtttgtatcccagaatgtgttgtgttttttaaaagatgcataatagctgaatgtatgcatgactttgaaagaagttaaaatggtgattttttttcacctcttgtacattttaaaaccaggccaaatctatttgccaagcagtgtatcactaataagaaaagcagtttttccttttattgcagtttttgtttatctgccatagaatttccttatactgtggcttggtattattcaagattagctatttcgctggtattacatctttttaaaagcctattataacatggttagcctataaggcagtgttggtccccttctaatattggcctcataaaggggttccactgtactttccgcatattactgtgttgttgttttcctttgtggatatataagcaaattgagcttgggtgatttttatggagacaataattagacaatactgtataattagttttacttaatagattatcatcttgtgagaagagatgtttaaacgtggtaaatcacttcatattacaaaacagttttacacttaatatgttaacattgggtgcaataatttagtagcattagctttagttacaaatataactggatctttctgctgacaacttaggttgtatgagttatgcttaaaagctttaaatctgatgtttcctgtacctgccacactatgttagaatgtgtccttcaaacatatcctcctgcaacttctcaaactgtactaaattgatatttcttgaagtctaactctgtgctaacagatctccattttaaatagaatacggttttaatttttgataagctgctgaattttaaagagagttttttggggccaccaaatattttggatcatgcagagaatatatattgtactgtagtaattttgtatttacatttgtatgatgtgacataatagatgtgaatgttaatcactgcttgactatgttaataaagttgtttaactata

SEQ ID NO: 2316 - DNA, 2849 bp, Homo sapiens
gcggccgcggctcccgagctcctcgggctctgggtcccggcgcccctccggccgcgagtcccacgcgccacccccgggcgccctcgacggtggatctagcggcggcgaggaggcgggtcccggccccggcgaaccccagtcccggcccccggccccgggcccagcttcggcatggatgtgaggttctaccccgcggcggccggggaccctgccagcctggacttcgcgcagtgcctggggtactacggctacagcaagtttggaaataataataactatatgaatatggctgaggcgaacaatgcgttcttcgctgccagtgagcagacattccacacaccaagccttggggacgaggaattcgaaattccaccaatcacgcctcctccagagtcagaccctgccctaggcatgccggatgtactgctaccctttcaagccctcagcgatccattgccttcccagggaagtgaattcacaccccagtttccccctcaaagcctggacctcccttccattacaatctcaagaaatctcgtggaacaagatggcgtgcttcatagcagtgggttgcatatggatcagagccacacacaagtgtcccagtaccggcaggatccctccctgatcatgcggtccatcgtccacatgaccgatgctgcgcgttctggggtcatgcctcctgcccagctcaccaccatcaaccagtctcagctcagcgcccagttggggttgaatttgggaggtgccagtatgcctcacacatctccttcacctccagcaagcaaatcagccactccctccccttccagctccatcaatgaagaggatgctgatgaagccaacagagccattggagagaaaagagctgctccagactctggcaagaagcccaagactccaaagaaaaagaaaaagaaagatcccaatgagccacagaagccagtgtcagcatatgccctgtttttcagagacacacaggctgcaattaaaggtcaaaaccccaatgcaacctttggagaggtctcaaaaattgtagcatctatgtgggacagccttggagaagaacaaaagcaggtatataaaaggaaaacagaagctgccaaaaaagaatacctgaaggccctggcggcatacagggccagcctcgtttctaaggctgctgctgagtcagcagaagcccagaccatccgttctgttcagcagaccctggcgtcgaccaatctaacatcctctctccttctcaacactccactgtctcaacatggaacagtgtcagcatcacctcagactctccagcaatccctccctaggtcaatcgctcccaaacccttaaccatgagactccccatgaaccagattgtcacatcagtcaccattgcagccaacatgccctcgaacattggggctccactgataagctccatgggaacgaccatggttggctcagcaccctccacccaagtgagtccttcggtgcaaacccagcagcatcagatgcaattgcagcagcagcagcagcagcaacaacaacagatgcaacagatgcagcagcagcaactccagcagcaccaaatgcatcagcaaatccagcagcagatgcagcagcagcatttccagcaccacatgcagcagcacctgcagcagcagcagcagcatctccagcagcaaattaatcaacagcagctgcagcagcagctgcagcagcgcctccagctgcagcagctgcaacacatgcagcaccagtctcagccttctcctcggcagcactcccctgtcgcctctcagataacatcccccatccctgccatcgggagcccccagccagcctctcagcagcaccagtcgcaaatacagtctcagacacagactcaagtattatcgcaggctatacctacaatatgtgaatcaaactgtttaatgaatcctgggacatactgatgactataaactggcctctctgagtcatagaaaaatggccttatttctccagaagtgagtaaaccacacttccaggctatctgaactcctgaagccctaaaaataaaaagcacagttgtaactacctgaaatatgaagatccagtttcatacaaacatttgtatgacgtgaatagttgatggcatttttttgtcatgaaaaaaataatgtaaatcacagacttttgccaaagctcttattttttttcctaaatctctccagaaaaaaaatgcaagtgactaaattcaattattgactaatttccactttttatccatgacttctccaaatcaaaccacagtatatgttgtaacaatatctatgaccactgttagcccattatattcattccaattagaagaaatgtgaatactatattccgtgttttgagtgacaagtttcgaaaaataaaaacactgtatttttaaaagggaaatgcacttaaatgaaaacagttattacaaaagttaagatttaaaaagaaaaagcaagagtttttattatgatgtaataccagtagaatatttaaaaggcacaccacatctgaataatcaatgtaaatattttctttcaaagttgtaagttttcatatcatgtgctgtaaagttttcctaaatgaggctttaacgtaaacactggtgacataaaccattcattgctacgttgcttattgtgtttttatgctgttttatacttttttatgagttatgatagcagcaattaagttgtttgtattttgcttaactaaaacaaaaatgcttttatcttgctatagaataaacacatttcagtaaaaactgtggactgtattttgatgcaacaacaaagaaactgttcacttttcaaataaaatgatatgtcagatttca

SEQ ID NO: 2317 - DNA, 2684 bp, Homo sapiens
cccgagaggagtcggtggcagcggcggcggcgggaccggcagcagcagcagcagcagcagcagcaaccactagcctcctgccccgcggcgctgccgcacgagccccacgagccgctcaccccgccgttctcagcgctgcccgaccccgctggcgcgccctcccgccgccagtcccggcagcgccctcagttgtcctccgactcgccctcggccttccgcgccagccgcagccacagccgcaacgccacccgcagccacagccacagccacagccccaggcatagccttcggcacagccccggctccggctcctgcggcagctcctctgggcaccgtccctgcgccgacatcctggaggttgggatgctcttgtccaaaatcaactcgcttgcccacctgcgcgccgcgccctgcaacgacctgcacgccaccaagctggcgcccggcaaggagaaggagcccctggagtcgcagtaccaggtgggcccgctactgggcagcggcggcttcggctcggtctactcaggcatccgcgtctccgacaacttgccggtggccatcaaacacgtggagaaggaccggatttccgactggggagagctgcctaatggcactcgagtgcccatggaagtggtcctgctgaagaaggtgagctcgggtttctccggcgtcattaggctcctggactggttcgagaggcccgacagtttcgtcctgatcctggagaggcccgagccggtgcaagatctcttcgacttcatcacggaaaggggagccctgcaagaggagctggcccgcagcttcttctggcaggtgctggaggccgtgcggcactgccacaactgcggggtgctccaccgcgacatcaaggacgaaaacatccttatcgacctcaatcgcggcgagctcaagctcatcgacttcgggtcgggggcgctgctcaaggacaccgtctacacggacttcgatgggacccgagtgtatagccctccagagtggatccgctaccatcgctaccatggcaggtcggcggcagtctggtccctggggatcctgctgtatgatatggtgtgtggagatattcctttcgagcatgacgaagagatcatcaggggccaggttttcttcaggcagagggtctcttcagaatgtcagcatctcattagatggtgcttggccctgagaccatcagataggccaaccttcgaagaaatccagaaccatccatggatgcaagatgttctcctgccccaggaaactgctgagatccacctccacagcctgtcgccggggcccagcaaatagcagcctttctggcaggtcctcccctctcttgtcagatgcccgagggaggggaagcttctgtctccagcttcccgagtaccagtgacacgtctcgccaagcaggacagtgcttgatacaggaacaacatttacaactcattccagatcccaggcccctggaggctgcctcccaacagtggggaagagtgactctccaggggtcctaggcctcaactcctcccatagatactctcttcttctcataggtgtccagcattgctggactctgaaatatcccgggggtggggggtgggggtgggtcagaaccctgccatggaactgttttcttcatcatgagttctgctgaatgccgcgatgggtcaggtaggggggaaacaggttgggatgggataggactagcaccattttaagtccctgtcacctcttccgactctttctgagtgccttctgtggggactccggctgtgctgggagaaatacttgaacttgcctcttttacctgctgcttctccaaaaatctgcctgggttttgttccctatttttctctcctgtcctccctcaccccctccttcatatgaaaggtgccatggaagaggctacagggccaaacgctgagccacctgcccttttttctgcctcctttagtaaaactccgagtgaactggtcttcctttttggtttttacttaactgtttcaaagccaagacctcacacacacaaaaaatgcacaaacaatgcaatcaacagaaaagctgtaaatgtgtgtacagttggcatggtagtatacaaaaagattgtagtggatctaatttttaagaaattttgcctttaagttattttacctgtttttgtttcttgttttgaaagatgcgcattctaacctggaggtcaatgttatgtatttatttatttatttatttggttcccttcctattccaagcttccatagctgctgccctagttttctttcctcctttcctcctctgacttggggaccttttgggggagggctgcgacgcttgctctgtttgtggggtgacgggactcaggcgggacagtgctgcagctccctggcttctgtggggcccctcacctacttacccaggtgggtcccggctctgtgggtgatggggaggggcattgctgactgtgtatataggataattatgaaaagcagttctggatggtgtgccttccagatcctctctggggctgtgttttgagcagcaggtagcctgctggttttatctgagtgaaatactgtacaggggaataaaagagatcttatttttttttttatacttggcgttttttgaataaaaaccttttgtcttaaaaaaaaaaaaaaaaaaaaaaaaaaaaaaaaaaaaaaaaaaaa

SEQ ID NO: 2318 - DNA, 5261 bp, Homo sapiens
ggcgcccgaccccagccaccgccctgcggccagcgcgtcccccgactcgccgcccggagaccccgaggctccaacgagttcagaaatgtccagaaatgacaaagaaccgttttttgtgaagtttttaaagtcttcagacaattccaaatgtttttttaaagctctcgagtccataaaagaattccaatcagaagaatatcttcagattattacagaagaagaggcattgaagataaaggagaatgatagatcactttatatctgtgacccttttagtggcgttgtctttgatcacctcaaaaagcttggctgcagaattgttggtcctcaagtagtcatattttgtatgcaccaccagcgatgtgtcccaagagccgaacatccagtttataatatggttatgtctgatgtaaccatatcttgtacaagtctggaaaaagaaaaaagggaagaagttcataaatatgtacaaatgatgggcggacgagtatacagagaccttaatgtatcagtaactcaccttattgcaggagaagttggtagcaaaaaatatttagttgctgcaaacctgaagaaacctattttgcttccctcttggataaaaacactttgggagaagtcacaagagaaaaaaataactagatatactgatataaacatggaagatttcaagtgtcctatttttcttggttgcataatctgtgtgactggcttatgtggcttagacaggaaagaagttcagcaactcacagttaagcatggaggtcaatacatgggacaattgaaaatgaatgaatgtacacacctcattgtgcaagaaccaaaaggtcagaagtatgagtgtgccaagagatggaatgtacactgtgtgaccacacagtggttttttgacagtattgagaaaggtttttgtcaggatgaatccatatacaagacagaacctagaccagaagcaaagactatgcccaattcttcaactcctaccagccagatcaacacaattgatagtcgtactctttcagatgtcagcaatatttccaacataaatgcaagttgcgtaagtgaatcaatatgtaattcacttaacagcaaactggagcctacacttgaaaatctagaaaatctggatgtcagtgcatttcaagcacctgaagatttattagatggttgtcggatatatctttgcggttttagtggcagaaagctagataaactgagaagacttattaacagtggaggtggagttcgttttaaccagctaaatgaagatgtaactcatgttattgtgggagattatgatgatgaattgaagcagttttggaataaatcagcccacaggcctcatgtagtgggagcaaagtggttgctagagtgtttcagtaaaggttatatgctttctgaagaaccatatatccatgctaattaccagccagtggaaattccagtttcacatcagcctgaaagtaaagcagctcttttaaaaaagaagaacagcagcttctctaagaaagactttgctcctagtgaaaagcatgagcaagctgatgaagatctgctctctcaatatgaaaatggtagctccacagtagttgaggctaagacgtctgaagccaggccctttaatgattctactcatgctgagcccttgaatgattctactcacatttctttgcaagaagaaaaccagtcttctgtcagtcattgtgtccctgatgtttctacaattactgaagaaggcttatttagccaaaagagtttccttgttttgggttttagtaatgaaaatgaatctaacatcgcaaacatcataaaagaaaatgctgggaaaatcatgtcccttctgagcagaactgttgcggattatgctgtggttcctctgctggggtgtgaagtggaagccactgtgggagaagttgttacaaatacatggctggttacttgcatagactatcagactttgtttgatccaaagtcgaatcctctcttcacaccagttccagtaatgacaggaatgactcctttagaggattgtgttatttcatttagccagtgtgctggagcagaaaaagagtctttaacattcctagcaaacctccttggagcaagtgttcaagaatactttgttcgcaaatccaatgcaaagaaaggcatgtttgccagtactcatcttatactgaaagaacgtggtggctctaaatatgaagctgcaaagaagtggaatttacctgccgttactatagcttggctgttggagactgctagaacgggaaagagagcagacgaaagccattttctgattgaaaattcaactaaagaagaacgaagtttggaaacagaaataacaaatggaatcaatctaaattcagatactgcagagcatcctggcacacgcctgcaaactcacagaaaaaccgtcgttacacctttagatatgaaccgctttcagagtaaagctttccgtgctgtggtctcacaacatgccagacaggtcgcagcctccccagcagtaggacaaccacttcagaaggagccctcgttacacctggatacaccatcaaaattcctgtccaaggacaaactcttcaagccttcctttgatgtgaaggatgcacttgcagccttggaaactccaggacgtcccagccaacagaaaaggaaaccgagtacgccactctcagaagttattgtcaaaaacttgcaacttgctttggcaaatagctctcgaaatgctgtcgctctttctgccagccctcaactgaaagaggcccagtcagagaaggaagaagccccaaagccacttcacaaagtagtggtatgtgttagtaaaaaactcagtaagaagcagagtgaactaaatgggatcgcagcctctctaggagcagattacaggtggagttttgatgaaacagtgactcatttcatctatcaagggcggccaaatgacactaatcgggagtataaatctgtaaaagaaagaggagtacacattgtttccgagcactggcttttagattgtgcccaagagtgtaaacatcttcctgaatctctttatccacatacttataatcccaaaatgagcttggatatcagcgcagtgcaagatggccggctctgtaatagtcgactactctcagctgtgtcttcaacaaaggatgatgagccagatcctttgattttagaagaaaatgatgtagacaatatggccaccaataataaagagtcagcaccatcaaatggaagtggaaagaatgactctaaaggagttctgacacagaccttagagatgagagagaactttcagaagcagttacaggagataatgtctgcaacatcaatagtgaaaccccaagggcagaggacttccctttcaagaagtggttgtaacagcgcatcttcaacccctgacagcactcgctctgctcgcagtggacgaagtagagtcctagaggcactgaggcagtctcgtcagacagtacctgatgtcaacacagagccttcccaaaatgaacagatcatttgggatgaccctacagcaagggaggagagagcaaggcttgccagcaatttgcagtggcctagttgtcccacacaatactctgagcttcaggttgacattcaaaacttggaggattctccttttcaaaagcctttacatgattcagaaattgctaaacaggctgtctgtgatcctggaaacatacgtgtgactgaagctcccaaacacccaatctctgaagaactggaaactcccataaaagacagccacctgatccctacgcctcaagcccccagtattgcctttccactcgccaacccccctgtggctccgcaccctagagaaaagattataacgatagaggagactcatgaagaattaaaaaaacagtacatatttcagttatcatctctgaatcctcaagaacgtattgactattgtcatctgattgagaaactaggtggattggtgatagaaaagcagtgctttgatcccacctgtacacacattgttgtgggacatccacttcgaaacgagaagtatttagcctcagtggcagctgggaagtgggtgcttcatcgctcctaccttgaagcctgcaggactgctggacacttcgtgcaggaagaagactatgaatggggaagtagttccatacttgatgttttgactggaatcaatgtacagcaacgaagactagcacttgcagcaatgagatggagaaaaaaaatccagcaaagacaagaatctggcattgttgagggagcatttagtgggtggaaggttattttacatgtggatcagtctcgagaagcaggcttcaaacgccttcttcagtcaggaggagcaaaggtgctacctggtcattctgtacctttatttaaagaggccacacatcttttttctgacttgaataaactgaaaccagatgactcaggagttaatatagcagaagctgctgcccagaacgtgtactgcttgagaacagaatacattgctgattatctcatgcaggaatcacctcctcatgtagaaaattactgtctaccagaagctatttcatttattcagaataataaggaacttgggactggattatcacaaaagaggaaagctcctacagaaaaaaataaaatcaaacgacctagagtacactaatcgcatctaccctttagttaccaaacattaaatgtttttaaaaattgaaagcctgaatgtgactgtgatagatttgggtagtaatttaaagatgagtacctgaagaattctgcttcagagtataatgatgacccttcttgagttttgaacacctgaaattgtaatcactgaaatattaactgtttcttaataaaaagttacctgaaataacaacaaaatacaactcctcagctagcttgctgttaaaccacattgaagtctgttaaaagatatttatttttcttgtaaatatctgaagctgtagcttagtggaaattttagcaaggtaatggattttgctttaaaatgtctgccttacaaattcataacaacaagatttgtcagtcagcatttattcatgttttccctgatttttatcttctcaccattttacctcttttaacaggagcctgagcacaaggtttaatgaggaagctggggctataaatatgtgtgtatatatgtatatgtatgtttgtacaaatctccatgatgtttgccaagtttgaatgcgcaaaacttggaaaatgtgacaataaagaataaaagtagtaactcaaattagtat

SEQ ID NO: 2319 - DNA, 4163 bp, Homo sapiens
gagggagtgaaatgcttaattcaggaatggattttggagtttctgggtgctgaagaaatagggcctttccgcctgcgggcccagtgagtcgacacggtgggggcccgcgatccccgggacttaccactgaataaatccagtccagcgtgcgacgacttactggcttcatggggtcgcagccgccgctggggtctccgctgtctcgcgaggagggtgaagcgcccccgcctgctcccgcttcggagggtaggcggagaagtcgccgggtacgccttcgcggatcctgccgacaccgacctagctttctgggctgccgggagctcgcggcgagcgccccagccaggcctgcgccggcatcctccgagataatggcatcagctgctaaggaatttaaaatggacaacttttcacctaaagctggcactagcaaattgcaacagacagtaccagctgatgcatctcctgattctaagtgtcctatatgcttggatagatttgataatgtgtcttacttagatcgctgcttacataagttctgttttcgctgtgtacaggagtggtcaaaaaacaaagctgaatgcccactatgtaaacagccctttgattctattttccattctgtgagggcagaagatgacttcaaggagtatgtcctaaggccttcgtataatggttcttttgtcacccctgatcgacgatttcgctaccgtacaactctgacaagggaacgaaatgcttctgtgtattcacctagtggtcctgtgaacagaagaacaacaactccaccggatagtggagtactgtttgaagggttaggcatttcaacaagacctagagatgttgaaattcctcagtttatgagacagattgcagtaaggaggccaactacggcagatgaaagatctttgcggaaaattcaagaacaagatattattaattttagacgaactctttatcgtgctggtgctcgagttagaaatattgaagatggtggccgctacagggatatttcagctgaatttttccgtagaaatccagcttgccttcacagattagtcccctggttaaaacgtgaacttacagttctttttggagctcatggatctttagtgaatattgtccagcatattatcatgagtaatgttactcgctatgacttggagagtcaggcatttgtgtctgatttaagaccatttttacttaatcgaactgagcattttatacatgaatttatcagttttgcccgatctccttttaacatggcagcctttgaccagcatgccaattatgattgccctgctccttcatacgaagaaggcagccattctgattcttcagtcataacaatatctccagatgaggctgagacccaagagctggatattaatgtagccactgttagtcaggcaccatgggatgatgaaactccaggaccatcttactcaagctcagagcaggtacacgttactatgtcttctcttttaaatacttctgacagttcagatgaagaacttgtcacaggaggagccacgtctcagatacaaggagtacaaaccaatgacgacctaaataatgacagtgatgattcttcagataattgtgtcattgttgggtttgttaaaccactagctgagaggaccccagaacttgttgaactgtcctctgattctgaggacttaggttcttatgagaaaatggagacagtgaagacacaagaacaggagcaatcttacagttctggtgatagcgatgttagtagatgctcatctccacactctgtccttggaaaggatgaacaaataaataaaggtcattgtgattctagtacaagaatcaaatcaaagaaggaagagaaacgatctacatcattgtcatctcccagaaacctgaactcatctgtaagaggagacagagtatattctccatataaccatagacacagaaagaggggaagatcaagaagttcagattcacgttctcagagtagaagtgggcatgatcagaagaatcatagaaagcatcatgggaagaaaagaatgaaaagtaaacgatccagaagcagggaaagtagcagacctagagggagaagagacaaaaagagatcaagaactagagatagcagttggtccagaagaagccaaactctgtctctaagtagtgaaagcacaagcagatcaaggtctcgtagcagtgatcatggtaaaagaagatcacggagcagaaatagagatcgttattatttaagaaataattatggaagcagatacaaatgggagtatacttattacagtagaaacaaggacagggatgggtacgaatcatcttacaggaggaggactctgtccagagctcattattctagacagtcttcaagtccagaatttagagttcagtccttttctgaaagaacaaatgctaggaaaaaaaataatcacagtgagaggaagtattactactatgaaaggcacagatcaaggagcctgtctagtaacagatcaaggactgcatctaccgggactgaccgggtgagaaatgaaaagcctggagggaaacgaaaatacaaaacacggcatttggagggtactaacgaagtggctcagccatctcgtgaatttgcttctaaagcaaaggacagtcattaccaaaaatcttcatcaaaattggatggaaactacaaaaatgagagtgataccttttcagacagccgatcatcagacagagagacaaaacacaaaaggagaaaaaggaagacccggagcctaagtgtagagatagtttatgaaggaaaagctactgatacaactaaacaccataaaaagaaaaagaagaaacataagaagaagcataagaaacaccatggagataatgcttcacgttccccagttgtaattaccattgacagtgacagtgataaggattctgaagtaaaggaggatacagaatgtgacaatagtggtcctcaagaccctctacaaaatgagtttttggctccttccttggaaccatttgaaactaaagatgtagttacaatagaagctgaatttggtgtgctggacaaggaatgtgatattgccacacttagtaacaacttgaataatgccaacaaaactgtagataatattccacctctggcagcttcagttgaacaaactctcgatgtaagagaagagagcacctttgtttctgatttggagaaccagcccagtaacattgtgtctcttcaaactgagccatcaaggcaattgccatcgccacggacatcattaatgtcagtatgtcttggtagagactgtgatatgtcttaaaactgccaaagcatttcattgagaattatgatgttataaaaaggaaaaaggaagaatgtcgtctactgcagtctatttaaagatgacatttggtgaaaactctcttcctccttacaatattttaaatgattttttttttggtgttaatttgtaaaaatcattatttgttcaaaatgtatgtcccaccctcaaagatatgcacttttaagtgaagaaaatgatactgctagcagcttatttaaaacttggggtcctttttaaataagaaaaattatataaattttagaagttatttcataaagccatacggtattgacatatttttaaggtagtcaatgagtatttttgaattttttttttttgagagttattctggaaatgtgttataagctaggagaatccctttggacagtctttatttttcttcttaaaaatttatatgattcaaaaccatttcttcaggttaaattgaggcattttaatctgcacagtttatcttctgccaaaataaaaatttactatttcctttatatacttgtttatctggactgccagtaaaacaaatgtgtattcaacaaaagaaaaaaaataaaacagtaacactttaaaacaagaatcagacattttcctatgcagtatttttttttaaagtttattttagtaaagttaaaatcttgaaagtagctaagggcataattatgtcataaatactgaacttcaggtgaacaaatactttatagttttaattattttctttgattttgaggagtatcttatttgctttctatcatcagtaaaaacagcatttaacttgctaaataaacatgaaaaacccttgtcataaaaaaaaaaaaaaaa

SEQ ID NO: 2320 - DNA, 5171 bp, Homo sapiens
gactggcttcgggcggcggccccggcggcctgtggacggacgggtgggccgaggtacaggccccacggccgccgtctcccgcttctgcccgcgcagagtccgcgccatggccgcctcgccgggctcgggcagcgccaacccgcggaagttcagtgagaagatcgcgctgcacacgcagagacaggccgaggagacgcgggccttcgagcagctcatgaccgacctcaccctgtcgcgggttcaatttcagaagcttcagcaactgcgccttacacagtaccatggaggatccttaccaaatgtgagccagctgcggagcagtgcgtcagagtttcagccgtcatttcaccaagctgataatgttcggggaacccgccatcacgggctggtggagaggccatccaggaaccgcttccaccccctccaccgaaggtctggggacaagccagggcgacaatttgatggtagtgcttttggagccaattattcctcacagcctctggatgagagttggccaaggcagcagcctccttggaaagacgaaaagcatcctgggttcaggctgacatctgcacttaacaggaccaattctgattctgctcttcacacgagtgctctgagtaccaagccccaggacccctatggaggagggggccagtcggcctggcctgccccatacatgggtttctgtgatggtgagaataatggacatggggaagtagcatctttccctggcccattgaaagaagagaatctgttaaatgttccgaagccactgccaaaacaactgtgggagaccaaggagattcagtccctgtcaggacgccctcgatcctgtgatgttggaggtggcaatgcttttccacataatggtcaaaacctaggcctctcacccttcttggggaccttgaacactggagggtcattgccagatctaaccaacctccactactcgacacccctgccagcctccctggacaccaccgaccaccactttggcagtatgagtgtggggaatagtgtgaacaacatcccagctgctatgacccacctgggtataagaagctcctctggtctccagagttctcggagtaacccctccatccaagccacgctcaataagactgtgctttcctcttccttaaataaccacccacagacatctgttcccaacgcatctgctcttcacccttcgctccgtctgttttcccttagcaacccatctctttccaccacaaacctgagcggcccgtctcggcgtcggcagcctcccgtcagccctctcacgctttctcctggccctgaagcacatcaaggtttcagcagacagctgtcttcaaccagcccactggccccatatcctacctcccagatggtgtcctcagaccgaagccaactttcctttctgcccacagaagctcaagcccaggtgtcgccgccacccccttaccctgcaccccaggagctcacccagcccctcctgcagcagccccgcgcccctgaggcccctgcccagcagccccaggcagcctcctcactgccacagtcagactttcagcttctcccggcccagggctcatctttgaccaacttcttcccagatgtgggttttgaccagcagtccatgaggccaggccctgcctttcctcaacaggtgcctctggtgcaacaaggttcccgagaactgcaggactcttttcatttgagaccaagcccgtattccaactgcgggagtctcccgaacaccatcctgccagaagactccagcaccagcctgttcaaagacctcaacagtgcgctggcaggcctgcctgaggtcagcctgaacgtggacactccatttccactggaagaggagctgcagattgaacccctgagcctggacggactcaacatgttaagtgactccagcatgggcctgctggacccctctgttgaagagacgtttcgagctgacagactgtgaacagaaggcagtggaacagaagaatgtttttctgcaacagccaaaatagaatggaatagaatgaagccagctgataccacgggctttcgttatcttgacatagaaggaagcaatgccacggctccagggtttcagatgagatcccatctcagacactgtggcttcctccagatcacacagctttgtactgcctctcccgcctgtggccaaagtcgtgttgcagcaggcaggctgcttggagcttcccatgaactggaaagctcacctccactgcatctttttactggccatccagtcagccgatgtgtaagagtaggaaatactgtgtcactggaggcctccgtagcattgtgtagtgtgctcagaaccactgatctccgtccgcaccgaaggcgggcccggagtgggaggctcggcctggggcggcggcaccggagagggcacctcgatgcctgctctgacctgacccagagggcgaggccctccagcgggggacattcccaggctgagtggaccccacggctctctcccacgcctggattacgacatgaagtttttaccacaagcccgagggcaggcttgagttaggcagactgaaggctaattttcattttctcccagctggtttctgctgcttcagaaaagtacaccttttccttatggaccagaggaagaggaagaccattttatcagtcactgaaaagagtcccctggcactgatgagcctgaagagaactgtgctcctcctcgggggctggggaaggaagacagggactgcaggtgtctcatactcagtggcctccagacaaactccagacaagcacagacctccccactaagagcagccagagggagctggtgaggccctaaccccacccaccgagcaactgagcttccccatccctccccagagctgtgtctctgtgggctgggagtctaatgtcacccccctagaccgtaagctccttgagggcagggacagtgccttatcattgttgaacccgtagcacctaacacgtgcgtggcagcacagtcgtgtgctggagtgagtgctgcagaaccgtgcgtgcagcgcatgatgaatgagtgcgtccgccatgccgtaaggcaggctcacctgtagctatccccttccctgccagatcttctcagagctttagcttttctagcactcgtgcctatggtgaagcatgcactttaatatgcttttaacactaggtgaccaaatcacagtgaagccgggcactgcattctccttgggctgtgctccacgcgggtgggtgggagctgtcttctgagtacatccggaagggctgagcaggtgagtgccctgagcatcctggctgggccccacccaggaagatcttccttctcagatccacgtttggctctaaattgcttcaagtagagattcattctttgaggttgaaaaaatagtttatagtaaaacgaaggcctaattcatggaagcatcattagtcatcaataccttctcataaaatagatgggccagatttccaccaccgcctgcctcctctaacttgggtgatgccagtaggtttgaagggggcagagcactgcagggggaggggggggtctaggctgtgagaggacagggtggagaggaggagaaccctgaaggagagacggaagatgccaggacctttgcttggacagccattgcccttccaggagaccctggagtgtactgagggttgctggactgttccacccagaggagcaaggctgtacaatgagggtctgaatctggcacacctgtcccttatgtaaaaggagtcgtggtcacaagaccctgggctggttagcctctcccgacctcattccatttctatcttctgaccttgcctctcatctttaaaataaccctcatggggtgcccctccaccttcctctggaatccaagtattcctgtttcacatttgccccaaatctttgctgtggaattgggaaatcaaaccagagtcctcctcgcctgatttccagctcaggaagggcctgctggcctgccctgttcccagttacactttcagatccctttgtgctcaagatctcagagggggtggctttttgttaaagagccttcagtcgcaatgctacccagcaccccatgtgccaaaagaaaccagctcctgtgtcaaagggcttccaaacctgatctcactctcaacaggcgatggtgctgatgtttcaagaattgtgtttttataaaacagaggtctcagcatagtcactcttcacatagtgccttacccatgggtatcgtcatatccgggtcccagttcagtttgtctgcacagcagccaccctgcctggcaacagagaccccaagacctacacagtgaaccctactgccccaaaggcgttctccaggtgacttgtgaaaacagacctccggggaagtgatttattgggggtgtacactgggggcaatatggtttagcactgaattcaatttgtccttaggtctatgagtgagtccgatcttttcttgtgaaaggttttgggcatcgtacaacccactctgcctagaaggtgtggaggactcaccacgggcagggtcgccctggcccacagcacgtgagcctgcactcactgcggcctttgtaacaaaaccagttgtggtcctcagcatttgaagcagctgcatacttcagagtaaactatttttcattatttagttttgtcacaagaaatcgaccattgtactactctcacttacagcagttaaacagcatagaactaaaaacctgtctgcatttccattttttctttctgtatggttgtgggttttaggacatagggggttaggagaaggggtttcttgatcatgtcatgaattctcctttgtcctgtttctcctgtttcatttctcctccgcctgctgtatattacctgagctggtgttgtatcttcaagtccatatgcgtatttgcagacctttcctgttcccactcttgttggctcttctgatttatgcacagatggttcccagcatgtgtccagtgcttcatggatgggaccatcccagcaactaatcagacttcctgccagtgtcctaacccccagggcaccctgttcaaccatatttaaaaattggaatttgtataaagttgcttccaagttttataatgcatcattttacatcttttgtaattaaaagcatcacaatgaggttgtctctgca

SEQ ID NO: 2321 - DNA, 1675 bp, Homo sapiens
gtgacaaccggaagcggaagtgaaaatgggtgtccctgctgcctcttagcaacaagaggggtcaagtgacacaaccagctgactcccgtagaggaagacactgtggaggccagttctggagctattgcagcctcggttgcccggccggggacccgagccgaaaagttatcgtcagaatgtcgggcaaagaccgaattgaaatctttccctcgcgaatggcacagaccatcatgaaggctcgtttaaagggagcacagacaggtcgaaacctcctgaagaaaaaatctgatgccttaactcttcgatttcgacagatcctaaagaagataatagagactaaaatgttgatgggcgaagtgatgagagaagctgccttttcactagctgaagccaagttcacagcaggtgacttcagcactacagttatccaaaatgtcaataaagcgcaagtgaagattcgagcgaagaaagataatgtagcaggtgttactttgccagtatttgaacattaccatgaaggaactgacagttatgaactgactggtttagccagaggtggggaacagttggctaaattaaagaggaattatgccaaagcagtggaactactggtggaactagcttctctgcagacttcttttgttactttggatgaagctattaagataaccaacaggcgtgtaaatgccattgaacatgtcatcattccccggattgaacgtactcttgcttatatcatcacagagctggatgagagagagcgagaagagttctataggttaaagaaaatacaagagaagaaaaagattctaaaggaaaaatctgagaaggacttggagcaaaggagagcagctggagaggtgttggagcctgctaatcttctggctgaagagaaggacgaggatcttctatttgaataatctttcctgttctggttctttgagaaaccctaacactggcttcattttaattcacagtgtgtaggtttgatttgtgtggctatttattttttggcctaagaatttcactggttgtaaaatttacctagatgtctatttatgggattacttttgcagaatcataatttagcaaccatttatcatggatgaaagagatctgtaaaacctgcccaggaacttacagaatttactttgcagaagcgttatcatactccatttacatctgtgttacacgtgatctgcttaccaagcatattaggaaatacctcttaggaagcattagcggtctcaggccaattactgtggagcagctttcattcctacccacttgcaaaccttggcgctgttgtctgagattgctgcagccattcttgttaccatggtacttctcaaactttgtgaaaacctgcacttttccttgcatgacaggttcctgtcttgtctgtcatgggagccattctgccaatttaaatgcgactgtggtataaacagtaaaatgatttaaaagtaagtcattccgtttttattaatttactgttaagtcatgttctcatgctcagatcagtagtgtcagccagagctttctctgcagacatgtaggaagtgggtagctatttttcccactccatgtattagagttttacaaaaaggcttacttttgagacaactgttgcattttggggtactaataaatgattgccgatgagttaaaaaaa

SEQ ID NO: 2322 - DNA, 9727 bp, Homo sapiens
gcgcaagaggatcagggatagcctctgagctcgggttcccagggttcgtagcttccaacggctgcgcgcgcacttcggtcgcgggcggtgaggtgctgttgctgaaacgctgccgctgagggtggactcgatttcccagggtcccgccgcgggagtctccggcgggcgggcgcgcgcgagccaccgagcgaggtgatagaggcggcggcccaggcgtctgggtcctgctggtcttcgcctttcttctccgcttctaccccgtcggccgctgccactggggtccctggccccaccgacatggcggcggtgttgcagcaagtcctggagcgcacggagctgaacaagctgcccaagtctgtccagaacaaacttgaaaagttccttgctgatcagcaatccgagatcgatggcctgaaggggcggcatgagaaatttaaggtggagagcgaacaacagtattttgaaatagaaaagaggttgtcccacagtcaggagagacttgtgaatgaaacccgagagtgtcaaagcttgcggcttgagctagagaaactcaacaatcaactgaaggcactaactgagaaaaacaaagaacttgaaattgctcaggatcgcaatattgccattcagagccaatttacaagaacaaaggaagaattagaagctgagaaaagagacttaattagaaccaatgagagactatctcaagaacttgaatacttaacagaggatgttaaacgtctgaatgaaaaacttaaagaaagcaatacaacaaagggtgaacttcagttaaaattggatgaacttcaagcttctgatgtttctgttaagtatcgagaaaaacgcttggagcaagaaaaggaattgctacatagtcagaatacatggctgaatacagagttgaaaaccaaaactgatgaacttctggctcttggaagagaaaaagggaatgagattctagagcttaaatgtaatcttgaaaataaaaaagaagaggtttctagactggaagaacaaatgaatggcttaaaaacatcaaatgaacatcttcaaaagcatgtggaggatctgttgaccaaattaaaagaggccaaggaacaacaggccagtatggaagagaaattccacaatgaattaaatgcccacataaaactttctaatttgtacaagagtgccgctgatgactcagaagcaaagagcaatgaactaacccgggcagtagaggaactacacaaacttttgaaagaagctggtgaagccaacaaagcaatacaagatcatcttctagaggtggagcaatccaaagatcaaatggaaaaagaaatgcttgagaaaatagggagattggagaaggaattagagaatgcaaatgaccttctttctgccacaaaacgtaaaggagccatattgtctgaagaagagcttgccgccatgtctcctactgcagcagctgtagctaagatagtgaaacctgggatgaaactaactgagctctataatgcttatgtggaaactcaggatcagttgcttttggagaaactagagaacaaaagaattaataagtacctagatgaaatagtgaaagaagtggaagccaaagcaccaattttgaaacgccagcgtgaggaatatgaacgtgcacagaaagctgtagcaagtttatctgttaagcttgaacaagctatgaaggagattcagcgattgcaggaggacactgataaagccaacaagcaatcatctgtacttgagagagataatcgaagaatggaaatacaagtaaaagatctttcacaacagattagagtgcttttgatggaacttgaagaagcaaggggtaaccacgtaattcgtgatgaggaagtaagctctgctgatataagtagttcatctgaggtaatatcacagcatctagtatcttacagaaatattgaagagcttcaacaacaaaatcaacgtctcttagtggcccttagagagcttggggaaaccagagaaagagaagaacaagaaacaacttcatccaaaatcactgagcttcagctcaaacttgagagtgcccttactgaactagaacaactccgcaaatcacgacagcatcaaatgcagcttgttgattccatagttcgtcagcgtgatatgtaccgtattttattgtcacaaacaacaggagttgccattccattacatgcttcaagcttagatgatgtttctcttgcatcaactccaaaacgtccaagtacatcacagactgtttccactcctgctccagtacctgttattgaatcaacagaggctatagaggctaaggctgcccttaaacagttgcaggaaatttttgagaactacaaaaaagaaaaagcagaaaatgaaaaaatacaaaatgagcagcttgagaaacttcaagaacaagttacagatttgcgatcacaaaataccaaaatttctacccagctagattttgcttctaaacgttatgaaatgctgcaagataatgttgaaggatatcgtcgagaaataacatcacttcatgagagaaatcagaaactcactgccacaactcaaaagcaagaacagattatcaatacgatgactcaagatttgagaggagcaaatgagaagctagctgtcgcagaagtaagagcagaaaatttgaagaaggaaaaggaaatgcttaaattgtctgaagttcgtctttctcagcaaagagagtctttgttagctgaacaaagggggcaaaacttactgctaactaatctgcaaacaattcagggaatactggagcgatctgaaacagaaaccaaacaaaggcttagtagccagatagaaaaactggaacatgagatctctcatctaaagaagaagttggaaaatgaggtggaacaaaggcatacacttactagaaatctagatgttcaacttttagatacaaagagacaactggatacagagacaaatcttcatcttaacacaaaagaactattaaaaaatgctcaaaaagaaattgccacattgaaacagcacctcagtaatatggaagtccaagttgcttctcagtcttcacagagaactggtaaaggtcagcctagcaacaaagaagatgtggatgatcttgtgagtcagctaagacagacagaagagcaggtgaatgacttaaaggagagactcaaaacaagtacgagcaatgtggaacaatatcaagcaatggttactagtttagaagaatccctgaacaaggaaaaacaggtgacagaagaagtgcgtaagaatattgaagttcgtttaaaagagtcagctgaatttcagacacagttggaaaagaagttgatggaagtagagaaggaaaaacaagaacttcaggatgataaaagaagagccatagagagcatggaacaacagttatctgaattgaagaaaacactttctagtgttcagaatgaagtacaagaagctcttcagagagcaagcacagctttaagtaatgagcagcaagccagacgtgactgtcaggaacaagctaaaatagctgtggaagctcagaataagtatgagagagaattgatgctgcatgctgctgatgttgaagctctacaagctgcgaaggagcaggtttcaaaaatggcatcagtccgtcagcatttggaagaaacaacacagaaagcagaatcacagttgttggagtgtaaagcatcttgggaggaaagagagagaatgttaaaggatgaagtttccaaatgtgtatgtcgctgtgaagatctggagaaacaaaacagattacttcatgatcagatcgaaaaattaagtgacaaggtcgttgcctctgtgaaggaaggtgtacaaggtccactgaatgtatctctcagtgaagaaggaaaatctcaagaacaaattttggaaattctcagatttatacgacgagaaaaagaaattgctgaaactaggtttgaggtggctcaggttgagagtctgcgttatcgacaaagggttgaacttttagaaagagagctgcaggaactgcaagatagtctaaatgctgaaagggagaaagtccaggtaactgcaaaaacaatggctcagcatgaagaactgatgaagaaaactgaaacaatgaatgtagttatggagaccaataaaatgctaagagaagagaaggagagactagaacaggatctacagcaaatgcaagcaaaggtgaggaaactggagttagatattttacccttacaagaagcaaatgctgagctgagtgagaaaagcggtatgttgcaggcagagaagaagctcttagaagaggatgtcaaacgttggaaagcacgtaaccagcatctagtaagtcaacagaaagatccagatacagaagaatatcggaagctcctttctgaaaaggaagttcatactaagcgtattcaacaattgacagaagaaattggtagacttaaagctgaaattgcaagatcaaatgcatctttgactaacaaccagaacttaattcagagtctgaaggaagatctaaataaagtaagaactgaaaaggaaaccatccagaaggacttagatgccaaaataattgatatccaagaaaaagtcaaaactattactcaagttaagaaaattggacgtaggtacaagactcaatatgaagaacttaaagcacaacaggataaggttatggagacatcggctcagtcctctggagaccatcaggagcagcatgtttcagtccaggaaatgcaggaactcaaagaaacgctcaaccaagctgaaacaaaatcaaaatcacttgaaagtcaagtagagaatctgcagaagacattatctgaaaaagagacagaagcaagaaatctccaggaacagactgtgcaacttcagtctgaactttcacgacttcgtcaggatcttcaagatagaaccacacaggaggagcagctccgacaacagataactgaaaaggaagaaaaaaccagaaaggctattgtagcagcaaagtcaaaaattgcacacttagctggtgtaaaagatcagctaactaaagaaaatgaggagcttaaacaaaggaatggagccttagatcagcagaaagatgaattggatgttcgcattactgcgctaaagtcccaatatgaaggtcgaattagtcgcttggaaagagaactcagggagcatcaagagagacaccttgagcagagagatgagcctcaagaaccttctaataaggtccctgaacagcagagacagatcacattgaaaacaactccagcttctggtgaaagaggaattgccagcacatcagacccaccaacagccaatatcaagccaactcctgttgtgtctactccaagtaaagtgacagctgcagctatggctggaaataagtcaacacccagggctagtatccgcccaatggttacacctgcaactgttacaaatcccactactaccccaacagctacagtgatgcccactacacaagtggaatcacaggaagctatgcagtcagaagggcctgtggaacatgttccagtttttggaagcacaagtggatccgttcgttctactagtcctaatgtccagccttctatctctcaacctattttaactgttcagcaacaaacacaggctacagcttttgtgcaacccactcaacagagtcatcctcagattgagcctgccaatcaagagttatcttcaaacatagtagaggttgttcagagttcaccagttgagcggccttctacttccacagcagtatttggcacagtttcggctacccccagttcttctttgccaaagcgtacacgtgaagaggaagaggatagcaccatagaagcatcagaccaagtctctgatgatacagtggaaatgcctcttccaaagaagttgaaaagtgtcacacctgtaggaactgaggaagaagttatggcagaagaaagtactgatggagaggtagagactcaggtatacaaccaggattctcaagattccattggagaaggagttacccagggagattatacacctatggaagacagtgaagaaacctctcagtctctacaaatagatcttgggccacttcaatcagatcagcagacgacaacttcatcccaggatggtcaaggcaaaggagatgatgtcattgtaattgacagtgatgatgaagaagaggatgatgatgaaaatgatggagaacatgaggattatgaagaggatgaggaagatgatgatgatgatgaagatgacacagggatgggagatgagggtgaagatagtaatgaaggaactggtagtgccgatggcaatgatggttatgaagctgatgatgctgagggtggtgatgggactgatccaggtacagaaacagaagaaagtatgggtggaggtgaaggtaatcacagagctgctgattctcaaaacagtggtgaaggaaatacaggtgctgcagaatcttctttttctcaggaggtttctagagaacaacagccatcatcagcatctgaaagacaggcccctcgagcacctcagtcaccgagacgcccaccacatccacttcccccaagactgaccattcatgccccacctcaggagttgggaccaccagttcagagaattcagatgacccgaaggcagtctgtaggacgtggccttcagttgactccaggaataggtggcatgcaacagcatttttttgatgatgaagacagaacagttccaagtactccaactcttgtggtgccacatcgtactgatggatttgctgaagcaattcattcgccgcaggttgctggtgtccctagattccggtttgggccacctgaagatatgccacaaacaagttctagtcactctgatcttggccagcttgcttctcaaggaggtttaggaatgtatgaaacacccctgttcctagctcatgaagaagagtcaggtggccgaagtgttcccactactccactacaagtagcagccccagtgactgtatttactgagagcaccacctctgatgcttcggaacatgcctctcaatctgttccaatggtgactacatccactggcactttatctacaacaaatgaaacagcaacaggtgatgatggagatgaagtatttgtggaggcagaatctgaaggtattagttcagaagcaggcctagaaattgatagccagcaggaagaagagccggttcaagcatctgatgagtcagatctcccctccaccagccaggatcctccttctagctcatctgtagatactagtagtagtcaaccaaagcctttcagacgagtaagacttcagacaacattgagacaaggtgtccgtggtcgtcagtttaacagacagagaggtgtgagccatgcaatgggagggagaggaggaataaacagaggaaatattaattaaatggtctgtaaacaataacaactgtgaataagattatcaaatctgttttagtgtaatgattgtcaagtttaaaaacatttttatatataaactggtatactcatgtcaatattctttattaataaaatgtttttcagtgtcaaaatttattattcatttcttcattagttgactcctcctttgctcatcagtctaaggacagttgtaccagactttggataaggtctgcccagaacgagtagtaattgctcttgctgttctactaggcacatcaatgttatagtattgatctaaatggaagagaaaacatttttttagttaaaaagaaaacaatgcccaaactaaaaaataacttatgttgactattatgctcaaagacaatgtttatcattttaatagagatgtttttactaattaatttgaactttataacaaaaagaaaaacaattgcctagacttttcagcttttttgatgtttcaaaagattgacatttcaccatctttttgtaaaatcaggttcagctctcctttatgaagtaaacattaaagagtaaccaagtttgaaaaataatttacttggggttattccttttaaaaaatacatgccaatgtcattcatattatgaaattacaggcagaataacttagatttctgggcatttcaaagaaaagcatcctgagtaatataatttaattaataaaattagtttctcaggaacttctttctgatcttacagactctgcagtgatgcaaatcattataaccttgtgccaaacaaggtatctgttaaatgccacaaatgatagaagtaaaatactattgtcagtagcaagtttactctagtaactggatgttttatcgtaatctcatgaaggttagagcagaattgaattgcagtgccatcattttaattgaaattaaagcaaaagtcttaactcttttccacagcaattagaataagtaccgtagtgtaacttctcacattcagtcatcattgcagccagcatttttactttatcttcatgttttcacaaatgatatcacctccttgggaaactgttagttaataccttacctttagaaaaggcatagtaatcatagccgtcaggttttctgatgttgggcagtgatatagctgaggtaaccacatttggaagtcctctccacagtatactcactttaacttcattatgaaggacacctgtaagtggcatgtttaataaaagataccagattaaaaggcaatgtactatcttggaaagagccagacatctgagttttaatctcagttttagccctctgatgtagaactattgagggttatagactggtatataatgttcttggtaagaagtacttgataaatagtattggttataactaacaaacctgaacaaactgctttacttacccacaaggaaaaagaaagtattggtctttggttattcactaaggcaagtggatgagtttttcatcagtaagcttaaattattagggctgtttgatcagtatccatatttcataagccttactgtataagaaactgtattacatctacttatgtttaaggatttttttaacacaataaaaatgttacctttgtcttgataagccagtctggcaggtgaatattgaattctgatggtgtgtgtttgagaaggtcctatagcacgttcaaagcgacgtctcctaacctgtgtcgtttctccatacactggataatttagagcaggccttcttccagggcacttctgtacaggttcctgtttataaatatactgctgaatgctgccacctgttatgtattagaatatcacatggaaaatgaaaattaattttaataccctcagaaaaggtggaaaacaacttttacaatgtataggaaacagttttgttctcatttttcatataatatattgatattaataatggctattagtcaagggtattataaaaataattattaaactgaaatacttgttgaatgaatagatgcagcaaattacatagttatatatttaatttcaattgaaagtgacaagtgctcagtttggcagcacatatactaaaactggaatgatacagagattagcatggcccttgtgcaaggatgacatgcacatttgtgaagcgaaagtaaatgacattctatcagtgacctgaaaactcaaatgaattgtgacttgcctgtgaagaaatgaaaataaaaattgagggcaataagaatactaccctcaatattgatttttttcactgaaaatatttgatttcagccattaaagatatcttttgacagtaaagtcaataataaatgaaaaaaaaaaaaaaaaaaaaaaa

SEQ ID NO: 2323 - DNA, 3685 bp, Homo sapiens; identical to SEQ ID NO: 218

SEQ ID NO: 2324 - DNA, 2780 bp, Homo sapiens
gtgggcggaccgcgcggctggaggtgtgaggatccgaacccaggggtggggggtggaggcggctcctgcgatcgaaggggacttgagactcaccggccgcacgccatgagggccctgtgggtgctgggcctctgctgcgtcctgctgaccttcgggtcggtcagagctgacgatgaagttgatgtggatggtacagtagaagaggatctgggtaaaagtagagaaggatcaaggacggatgatgaagtagtacagagagaggaagaagctattcagttggatggattaaatgcatcacaaataagagaacttagagagaagtcggaaaagtttgccttccaagccgaagttaacagaatgatgaaacttatcatcaattcattgtataaaaataaagagattttcctgagagaactgatttcaaatgcttctgatgctttagataagataaggctaatatcactgactgatgaaaatgctctttctggaaatgaggaactaacagtcaaaattaagtgtgataaggagaagaacctgctgcatgtcacagacaccggtgtaggaatgaccagagaagagttggttaaaaaccttggtaccatagccaaatctgggacaagcgagtttttaaacaaaatgactgaagcacaggaagatggccagtcaacttctgaattgattggccagtttggtgtcggtttctattccgccttccttgtagcagataaggttattgtcacttcaaaacacaacaacgatacccagcacatctgggagtctgactccaatgaattttctgtaattgctgacccaagaggaaacactctaggacggggaacgacaattacccttgtcttaaaagaagaagcatctgattaccttgaattggatacaattaaaaatctcgtcaaaaaatattcacagttcataaactttcctatttatgtatggagcagcaagactgaaactgttgaggagcccatggaggaagaagaagcagccaaagaagagaaagaagaatctgatgatgaagctgcagtagaggaagaagaagaagaaaagaaaccaaagactaaaaaagttgaaaaaactgtctgggactgggaacttatgaatgatatcaaaccaatatggcagagaccatcaaaagaagtagaagaagatgaatacaaagctttctacaaatcattttcaaaggaaagtgatgaccccatggcttatattcactttactgctgaaggggaagttaccttcaaatcaattttatttgtacccacatctgctccacgtggtctgtttgacgaatatggatctaaaaagagcgattacattaagctctatgtgcgccgtgtattcatcacagacgacttccatgatatgatgcctaaatacctcaattttgtcaagggtgtggtggactcagatgatctccccttgaatgtttcccgcgagactcttcagcaacataaactgcttaaggtgattaggaagaagcttgttcgtaaaacgctggacatgatcaagaagattgctgatgataaatacaatgatactttttggaaagaatttggtaccaacatcaagcttggtgtgattgaagaccactcgaatcgaacacgtcttgctaaacttcttaggttccagtcttctcatcatccaactgacattactagcctagaccagtatgtggaaagaatgaaggaaaaacaagacaaaatctacttcatggctgggtccagcagaaaagaggctgaatcttctccatttgttgagcgacttctgaaaaagggctatgaagttatttacctcacagaacctgtggatgaatactgtattcaggcccttcccgaatttgatgggaagaggttccagaatgttgccaaggaaggagtgaagttcgatgaaagtgagaaaactaaggagagtcgtgaagcagttgagaaagaatttgagcctctgctgaattggatgaaagataaagcccttaaggacaagattgaaaaggctgtggtgtctcagcgcctgacagaatctccgtgtgctttggtggccagccagtacggatggtctggcaacatggagagaatcatgaaagcacaagcgtaccaaacgggcaaggacatctctacaaattactatgcgagtcagaagaaaacatttgaaattaatcccagacacccgctgatcagagacatgcttcgacgaattaaggaagatgaagatgataaaacagttttggatcttgctgtggttttgtttgaaacagcaacgcttcggtcagggtatcttttaccagacactaaagcatatggagatagaatagaaagaatgcttcgcctcagtttgaacattgaccctgatgcaaaggtggaagaagagcccgaagaagaacctgaagagacagcagaagacacaacagaagacacagagcaagacgaagatgaagaaatggatgtgggaacagatgaagaagaagaaacagcaaaggaatctacagctgaaaaagatgaattgtaaattatactctcaccatttggatcctgtgtggagagggaatgtgaaatttacatcatttctttttgggagagacttgttttggatgccccctaatccccttctcccctgcactgtaaaatgtgggattatgggtcacaggaaaaagtgggttttttagttgaattttttttaacattcctcatgaatgtaaatttgtactatttaactgactattcttgatgtaaaatcttgtcatgtgtataaaaataaaaaagatcccaaat

SEQ ID NO: 2325 - DNA, 2492 bp, Homo sapiens
gggagcgcggcgcggccgccgcgtgcgcgagccggggttgcagcccagccgggactttccagccggcggcagccgcggcggccgccggctcttccccgccccccgtcatggggcagcccggggagcagaacgctgcggaccgcggcggaggacgcgcccggcgcccctgagccggccgagcggcgacggaccgcgagatgaggaaaatgaggcccaaagaagtgatgccacttggttaaggtcccagagcaggtcagaatcagacctaggatcagaaacctggctcctggctcctggctccctactcttctaaggatcgctgtcctgacagaagagaactcctctttcctaaaatggagtcgagtaaaaagatggactctcctggcgcgctgcagactaacccgccgctaaagctgcacactgaccgcagtgctgggacgccagtttttgtccctgaacaaggaggttacaaggaaaagtttgtgaagaccgtggaggacaagtacaagtgtgagaagtgccacctggtgctgtgcagcccgaagcagaccgagtgtgggcaccgcttctgcgagagctgcatggcggccctgctgagctcttcaagtccaaaatgtacagcgtgtcaagagagcatcgttaaagataaggtgtttaaggataattgctgcaagagagaaattctggctcttcagatctattgtcggaatgaaagcagaggttgtgcagagcagttaatgctgggacatctgctggtgcatttaaaaaatgattgccattttgaagaacttccatgtgtgcgtcctgactgcaaagaaaaggtcttgaggaaagacctgcgagaccacgtggagaaggcgtgtaaataccgggaagccacatgcagccactgcaagagtcaggttccgatgatcgcgctgcagaaacacgaagacaccgactgtccctgcgtggtggtgtcctgccctcacaagtgcagcgtccagactctcctgaggagcgaggggacaaaccagcagatcaaggcccacgaggccagctccgccgtgcagcacgtcaacctgctgaaggagtggagcaactcgctcgaaaagaaggtttccttgttgcagaatgaaagtgtagaaaaaaacaagagcatacaaagtttgcacaatcagatatgtagctttgaaattgaaattgagagacaaaaggaaatgcttcgaaataatgaatccaaaatccttcatttacagcgagtgatagacagccaagcagagaaactgaaggagcttgacaaggagatccggcccttccggcagaactgggaggaagcagacagcatgaagagcagcgtggagtccctccagaaccgcgtgaccgagctggagagcgtggacaagagcgcggggcaagtggctcggaacacaggcctgctggagtcccagctgagccggcatgaccagatgctgagtgtgcacgacatccgcctagccgacatggacctgcgcttccaggtcctggagaccgccagctacaatggagtgctcatctggaagattcgcgactacaagcggcggaagcaggaggccgtcatggggaagaccctgtccctttacagccagcctttctacactggttactttggctataagatgtgtgccagggtctacctgaacggggacgggatggggaaggggacgcacttgtcgctgttttttgtcatcatgcgtggagaatatgatgccctgcttccttggccgtttaagcagaaagtgacactcatgctgatggatcaggggtcctctcgacgtcatttgggagatgcattcaagcccgaccccaacagcagcagcttcaagaagcccactggagagatgaatatcgcctctggctgcccagtctttgtggcccaaactgttctagaaaatgggacatatattaaagatgatacaatttttattaaagtcatagtggatacttcggatctgcccgatccctgataagtagctggggaggtggatttagcagaaggcaactcctctgggggatttgaaccggtctgtcttcactgaggtcctcgcgctcagaaaaggaccttgtgagacggaggaagcggcagaaggcggacgcgtgccggcgggaggagccacgcgtgagcacacctgacacgttttataatagactagccacacttcactctgaagaattatttatccttcaacaagataaatattgctgtcagagaaggttttcattttcatttttaaagatctagttaattaaggtggaaaacatatatgctaaacaaaagaaacatgatttttcttccttaaacttgaacaccaaaaaaacacacacacacacacacgtggggatagctggacatgtcagcatgttaagtaaaaggagaatttatgaaatagtaatgcaattctgatatcttctttctaaaattcaagagtgcaattttgtttcaaatacagtatattgtctatttttaaggcctc

SEQ ID NO: 2326 - DNA, 2428 bp, Homo sapiens
gggagcgcggcgcggccgccgcgtgcgcgagccggggttgcagcccagccgggactttccagccggcggcagccgcggcggccgccggctcttccccgccccccgtcatggggcagcccggggagcagaacgctgcggaccgcggcggaggacgcgcccggcgcccctgagccggccgagcggcgacggaccgcgagaactcctctttcctaaaatggagtcgagtaaaaagatggactctcctggcgcgctgcagactaacccgccgctaaagctgcacactgaccgcagtgctgggacgccagtttttgtccctgaacaaggaggttacaaggaaaagtttgtgaagaccgtggaggacaagtacaagtgtgagaagtgccacctggtgctgtgcagcccgaagcagaccgagtgtgggcaccgcttctgcgagagctgcatggcggccctgctgagctcttcaagtccaaaatgtacagcgtgtcaagagagcatcgttaaagataaggtgtttaaggataattgctgcaagagagaaattctggctcttcagatctattgtcggaatgaaagcagaggttgtgcagagcagttaatgctgggacatctgctggtgcatttaaaaaatgattgccattttgaagaacttccatgtgtgcgtcctgactgcaaagaaaaggtcttgaggaaagacctgcgagaccacgtggagaaggcgtgtaaataccgggaagccacatgcagccactgcaagagtcaggttccgatgatcgcgctgcagaaacacgaagacaccgactgtccctgcgtggtggtgtcctgccctcacaagtgcagcgtccagactctcctgaggagcgagttgagtgcacacttgtcagagtgtgtcaatgcccccagcacctgtagttttaagcgctatggctgcgtttttcaggggacaaaccagcagatcaaggcccacgaggccagctccgccgtgcagcacgtcaacctgctgaaggagtggagcaactcgctcgaaaagaaggtttccttgttgcagaatgaaagtgtagaaaaaaacaagagcatacaaagtttgcacaatcagatatgtagctttgaaattgaaattgagagacaaaaggaaatgcttcgaaataatgaatccaaaatccttcatttacagcgagtgatagacagccaagcagagaaactgaaggagcttgacaaggagatccggcccttccggcagaactgggaggaagcagacagcatgaagagcagcgtggagtccctccagaaccgcgtgaccgagctggagagcgtggacaagagcgcggggcaagtggctcggaacacaggcctgctggagtcccagctgagccggcatgaccagatgctgagtgtgcacgacatccgcctagccgacatggacctgcgcttccaggtcctggagaccgccagctacaatggagtgctcatctggaagattcgcgactacaagcggcggaagcaggaggccgtcatggggaagaccctgtccctttacagccagcctttctacactggttactttggctataagatgtgtgccagggtctacctgaacggggacgggatggggaaggggacgcacttgtcgctgttttttgtcatcatgcgtggagaatatgatgccctgcttccttggccgtttaagcagaaagtgacactcatgctgatggatcaggggtcctctcgacgtcatttgggagatgcattcaagcccgaccccaacagcagcagcttcaagaagcccactggagagatgaatatcgcctctggctgcccagtctttgtggcccaaactgttctagaaaatgggacatatattaaagatgatacaatttttattaaagtcatagtggatacttcggatctgcccgatccctgataagtagctggggaggtggatttagcagaaggcaactcctctgggggatttgaaccggtctgtcttcactgaggtcctcgcgctcagaaaaggaccttgtgagacggaggaagcggcagaaggcggacgcgtgccggcgggaggagccacgcgtgagcacacctgacacgttttataatagactagccacacttcactctgaagaattatttatccttcaacaagataaatattgctgtcagagaaggttttcattttcatttttaaagatctagttaattaaggtggaaaacatatatgctaaacaaaagaaacatgatttttcttccttaaacttgaacaccaaaaaaacacacacacacacacacgtggggatagctggacatgtcagcatgttaagtaaaaggagaatttatgaaatagtaatgcaattctgatatcttctttctaaaattcaagagtgcaattttgtttcaaatacagtatattgtctatttttaaggcctc

SEQ ID NO: 2327 - DNA, 2515 bp, Homo sapiens
agcagagaaggcggaagcagtggcgtccgcagctggggcttggcctgcgggcggccagcgaaggtggcgaaggctcccactggatccagagtttgccgtccaagcagcctcgtctcggcgcgcagtgtctgtgtccgtcctctaccagcgccttggctgagcggagtcgtgcggttggtgggggagccctgccctcctggttcggcctccccgcgcactagaacgagcaagtgataatcaagttactatgagtctgctaaactgtgaaaacagctgtggatccagccagtctgaaagtgactgctgtgtggccatggccagctcctgtagcgctgtaacaaaagatgatagtgtgggtggaactgccagcacggggaacctctccagctcatttatggaggagatccagggatatgatgtagagtttgacccacccctggaaagcaagtatgaatgccccatctgcttgatggcattacgagaagcagtgcaaacgccatgcggccataggttctgcaaagcctgcatcataaaatcaataagggatgcaggtcacaaatgtccagttgacaatgaaatactgctggaaaatcaactatttccagacaattttgcaaaacgtgagattctttctctgatggtgaaatgtccaaatgaaggttgtttgcacaagatggaactgagacatcttgaggatcatcaagcacattgtgagtttgctcttatggattgtccccaatgccagcgtcccttccaaaaattccatattaatattcacattctgaaggattgtccaaggagacaggtttcttgtgacaactgtgctgcatcaatggcatttgaagataaagagatccatgaccagaactgtcctttggcaaatgtcatctgtgaatactgcaatactatactcatcagagaacagatgcctaatcattatgatctagactgccctacagccccaattccatgcacattcagtacttttggttgccatgaaaagatgcagaggaatcacttggcacgccacctacaagagaacacccagtcacacatgagaatgttggcccaggctgttcatagtttgagcgttatacccgactctgggtatatctcagaggtccggaatttccaggaaactattcaccagttagagggtcgccttgtaagacaagaccatcaaatccgggagctgactgctaaaatggaaactcagagtatgtatgtaagtgagctcaaacgaaccattcgaacccttgaggacaaagttgctgaaatcgaagcacagcagtgcaatggaatttatatttggaagattggcaactttggaatgcatttgaaatgtcaagaagaggagaaacctgttgtgattcatagccctggattctacactggcaaacccgggtacaaactgtgcatgcgcttgcaccttcagttaccgactgctcagcgctgtgcaaactatatatccctttttgtccacacaatgcaaggagaatatgacagccacctcccttggcccttccagggtacaatacgccttacaattcttgatcagtctgaagcacctgtaaggcaaaaccacgaagagataatggatgccaaaccagagctgcttgctttccagcgacccacaatcccacggaacccaaaaggttttggctatgtaacttttatgcatctggaagccctaagacaaagaactttcattaaggatgacacattattagtgcgctgtgaggtctccacccgctttgacatgggtagccttcggagggagggttttcagccacgaagtactgatgcaggggtatagcttgccctcacttgctcaaaaacaactacctggagaaaacagtgcctttccttgccctgttctcaataacatgcaaacaaacaagccacgggaaatatgtaatatctactagtgagtgttgttagagaggtcacttactatttcttcctgttacaaatgatctgaggcagttttttcctgggaatccacacgttccatgctttttcagaaatgttaggcctgaagtgcctgtggcatgttgcagcagctattttgccagttagtatacctctttgttgtactttcttgggcttttgctctggtgtattttattgtcagaaagtccagactcaagagtactaaacttttaataataatggattttccttaaaacttcagtctttttgtagtattatatgtaatatattaaaagtgaaaatcactaccgccttgtgctagtgccctcgagaagagttattgctctagaaagttgagttctcatttttttaacctgttatagatttcagaggatttgaaccataatccttggaaaacttaagttctcattcaccccagtttttcctccaggttgttactaaggatattcagggatgagtttaaaccctaaatataaccttaattatttagtgtaaacatgtctgttgaataatacttgtttaagtgttaaaaaaaaaaaaaaaaagaaaaaaaaaaaaaaaa

SEQ ID NO: 2328 - DNA, 2310 bp, Homo sapiens
gaggaagccccgccccgcgcagccccgtcccgccccttcccatcgtgtacggtcccgcgtggctgcgcgcggcgctctgggagtacgacatggcgcgcgagctgcgggcgctgctgctgtggggccgccgcctgcggcctttgctgcgggcgccggcgctggcggccgtgccgggaggaaaaccaattctgtgtcctcggaggaccacagcccagttgggccccaggcgaaacccagcctggagcttgcaggcaggacgactgttcagcacgcagaccgccgaggacaaggaggaacccctgcactcgattatcagcagcacagagagcgtgcagggttccacttccaaacatgagttccaggccgagacaaagaagcttttggacattgttgcccggtccctgtactcagaaaaagaggtgtttatacgggagctgatctccaatgccagcgatgccttggaaaaactgcgtcacaaactggtgtctgacggccaagcactgccagaaatggagattcacttgcagaccaatgccgagaaaggcaccatcaccatccaggatactggtatcgggatgacacaggaagagctggtgtccaacctggggacgattgccagatcggggtcaaaggccttcctggatgctctgcagaaccaggctgaggccagcagcaagatcatcggccagtttggagtgggtttctactcagctttcatggtggctgacagagtggaggtctattcccgctcggcagccccggggagcctgggttaccagtggctttcagatggttctggagtgtttgaaatcgccgaagcttcgggagttagaaccgggacaaaaatcatcatccacctgaaatccgactgcaaggagttttccagcgaggcccgggtgcgagatgtggtaacgaagtacagcaacttcgtcagcttccccttgtacttgaatggaaggcggatgaacaccttgcaggccatctggatgatggaccccaaggatgtccgtgagtggcaacatgaggagttctaccgctacgtcgcgcaggctcacgacaagccccgctacaccctgcactataagacggacgcaccgctcaacatccgcagcatcttctacgtgcccgacatgaaaccgtccatgtttgatgtgagccgggagctgggctccagcgttgcactgtacagccgcaaagtcctcatccagaccaaggccacggacatcctgcccaagtggctgcgcttcatccgaggtgtggtggacagtgaggacattcccctgaacctcagccgggagctgctgcaggagagcgcactcatcaggaaactccgggacgttttacagcagaggctgatcaaattcttcattgaccagagtaaaaaagatgctgagaagtatgcaaagttttttgaagattacggcctgttcatgcgggagggcattgtgaccgccaccgagcaggaggtcaaggaggacatagcaaagctgctgcgctacgagtcctcggcgctgccctccgggcagctaaccagcctctcagaatacgccagccgcatgcgggccggcacccgcaacatctactacctgtgcgcccccaaccgtcacctggcagagcactcaccctactatgaggccatgaagaagaaagacacagaggttctcttctgctttgagcagtttgatgagctcaccctgctgcaccttcgtgagtttgacaagaagaagctgatctctgtggagacggacatagtcgtggatcactacaaggaggagaagtttgaggacaggtccccagccgccgagtgcctatcagagaaggagacggaggagctcatggcctggatgagaaatgtgctggggtcgcgtgtcaccaacgtgaaggtgaccctccgactggacacccaccctgccatggtcaccgtgctggagatgggggctgcccgccacttcctgcgcatgcagcagctggccaagacccaggaggagcgcgcacagctcctgcagcccacgctggagatcaaccccaggcacgcgctcatcaagaagctgaatcagctgcgcgcaagcgagcctggcctggctcagctgctggtggatcagatatacgagaacgccatgattgctgctggacttgttgacgaccctagggccatggtgggccgcttgaatgagctgcttgtcaaggccctggagcgacactgacagccagggggccagaaggactgacaccacagatgacagccccacctccttgagctttatttacctaaatttaaaggtatttcttaacccgaaaaaaaaaaaaaaa

SEQ ID NO: 2329 - DNA, 923 bp, Homo sapiens
cgctgaggccccacagcctcccaattccgggcagacccctgacacctgctgtctggccccttccggcctgaagctgcagccgcgccatgtccacccctccgttggccgcgtcggggatggcgcccgggcccttcgccgggccccaggctcagcaggccgcccgggaagtcaacacggcgtcgctgtgccgcatcgggcaggagacagtgcaggacatcgtgtaccgcaccatggagatcttccagctcctgaggaacatgcagctgccaaatggtgtcacttaccacactggaacatatcaagaccggttaacaaagctacaggataatcttcgccaactttcagttctcttcaggaagctgagattggtatatgacaaatgcaatgaaaactgtggtgggatggatcccattccagtcgagcaacttattccatatgtggaagaagatggctcaaagaatgatgatcgggctggcccacctcgttttgctagtgaagagaggcgagaaattgctgaagtaaataaaaaactcaaacagaagaatcaacagctgaaacaaattatggatcaattacgaaatctcatctgggatataaatgccatgttggcaatgaggaactaagctgatatttaaatttcctgctttacacatgttataccattgtttttttccctcaagtattttttccctgtgaagaagattatttatctgcttttattttagtcactaaaactaaagtttttatttttacattgtgatttttacattaaaatattaactttttttaatgctattttatgaaagattattgtaataaactttgatggggtttgtattttggttaatcttcatgaattgaataattgtttttttaaagcaaaataaagttttttaaataaatgttaaaaaaaaaaaaaaaaa

SEQ ID NO: 2330 - DNA, 1278 bp, Homo sapiens
gctgaggggcagcggcttaggctccggcgtctgcaggggtcgccgagctaacccgtggctaggcgagtggggcggggcggccggcaccatgtcgaggcaggcgaaccgtggcaccgagagcaagaaaatgagctctgagctcttcaccctgacctatggtgccctggtcacccagctatgtaaggactatgaaaatgatgaagatgtgaataaacagctggacaaaatgggctttaacattggagtccggctgattgaagatttcttggctcggtcaaatgttgggaggtgccatgactttcgggaaactgcggatgtcattgccaaggtggcgttcaagatgtacttgggcatcactccaagcattactaattggagcccagctggtgatgaattctccctcattttggaaaataaccccttggtggactttgtggaacttcctgataaccactcatcccttatttattccaatctcttgtgtggggtgttgcggggagctttggagatggtccagatggctgtggaggccaagtttgtccaggacaccctgaaaggagacggtgtgacagaaatccggatgagattcatcaggcggattgaggacaatcttccagctggagaggaataaccatccctacaactcgaggatagccatcaggagcactgttggaatcagcaggcctctgtgctccctctgccctccagaactcagtgactcttgaacatggatgttatatattcttataacctgtttccattctccattcaaataaagagcagactgcgatatagtccatttaccccatgtgtgcacattcaggagcgacagtctctgcccccattcccttgagaggggctggatgtaatcacctttggttggactagaaagagctcaaaccattttacattcctgtttgaatttttccaaagcaaaactcactttgaccccattaagaggcaagcctggcacatctatccctgggcctttagaaagccatttgcctcaaatggctatagggttgtggggtggagggaggaagggctgggagggagtggggaggaattgctagctgtagtgtgacacattgtagtgtttgccaggaaaggagccagtcatgccggaaacactgacttctgggaagccacccaggtctcattcctccctgctgttggaggcaacatctcctctttttacagagggtacatccttttttcttacaaattcttcaataaagacacattcttgagtgaaatcccaaaaaaaaaaaaaaaaaa

SEQ ID NO: 2331 - DNA, 2290 bp, Homo sapiens
cttcacctcttcaaccaggagccgagatttctgttgctctgaagccatccaggggtctttaaccagaagagagaggagagcctcaggagttaggaccagaagaagccagggaagcagtgcaatggcttcaaaaatcttgcttaacgtacaagaggaggtgacctgtcccatctgcctggagctgttgacagaacccttgagtctagactgtggccacagcctctgccgagcctgcatcactgtgagcaacaaggaggcagtgaccagcatgggaggaaaaagcagctgtcctgtgtgtggtatcagttactcatttgaacatctacaggctaatcagcatctggccaacatagtggagagactcaaggaggtcaagttgagcccagacaatgggaagaagagagatctctgtgatcatcatggagagaaactcctactcttctgtaaggaggataggaaagtcatttgctggctttgtgagcggtctcaggagcaccgtggtcaccacacagtcctcacggaggaagtattcaaggaatgtcaggagaaactccaggcagtcctcaagaggctgaagaaggaagaggaggaagctgagaagctggaagctgacatcagagaagagaaaacttcctggaagtatcaggtacaaactgagagacaaaggatacaaacagaatttgatcagcttagaagcatcctaaataatgaggagcagagagagctgcaaagattggaagaagaagaaaagaagacgctggataagtttgcagaggctgaggatgagctagttcagcagaagcagttggtgagagagctcatctcagatgtggagtgtcggagtcagtggtcaacaatggagctgctgcaggacatgagtggaatcatgaaatggagtgagatctggaggctgaaaaagccaaaaatggtttccaagaaactgaagactgtattccatgctccagatctgagtaggatgctgcaaatgtttagagaactgacagctgtccggtgctactgggtggatgtcacactgaattcagtcaacctaaatttgaatcttgtcctttcagaagatcagagacaagtgatatctgtgccaatttggccttttcagtgttataattatggtgtcttgggatcccaatatttctcctctgggaaacattactgggaagtggacgtgtccaagaaaactgcctggatcctgggggtatactgtagaacatattcccgccatatgaagtatgttgttagaagatgtgcaaatcgtcaaaatctttacaccaaatacagacctctatttggctactgggttatagggttacagaataaatgtaagtatggtgtctttgaagagtctttgtcctctgatcccgaggttttgactctctccatggctgtgcctccctgccgtgttggggttttcctcgactatgaagcaggcattgtctcatttttcaatgtcacaagccatggctccctcatttacaagttctctaaatgttgcttttctcagcctgtttatccatatttcaatccttggaactgtccagctcccatgactctatgcccaccaagctcttgaattttctcatttcttcacctacaaccctttgtctcgacttatctcctgcaactgactcatctgcaacattcacaccattgcttccttgtggtttcccttctttagaacttttactcatccttgagatgtatggtgtatttggcttgagttatgagagatgcttatttattcatttactctttttcatattttcagagaaagttacctaatccctcctaaagacacagcagtatgggtataacatccttgccttcccatttatccatgtttcactttatcactgatgtgaagaggcccaaagcctgttagccaccatccatgctacctaggtagtccataggaaccacccccatgaccaccaccaacatcaactaaaggttcttggagggtatgtcagtgtgttgctcaggataccccaggtacatcaaggaatcaaggagaggaaaatatgagcaatatgtgtattcagagtgaagattttatgtccagagtatttgagctcaaaccttgcctgttgttttctaatcatgatgaatactttctcagtttctttttcctgaaatataaattgggatttaagactgtacctaactattaagatcactgtgtaaaactaagtgtctctaaatgtaatgcatcgatttagtgtctggaacataataaatatttgctctcatgattgctaaaaaaaaaaaaaaaaaa

SEQ ID NO: 2332 - DNA, 2223 bp, Homo sapiens
cttcacctcttcaaccaggagccgagatttctgttgctctgaagccatccaggggtctttaaccagaagagagaggagagcctcaggagttaggaccagaagaagccagggaagcagtgcaatggcttcaaaaatcttgcttaacgtacaagaggaggtgacctgtcccatctgcctggagctgttgacagaacccttgagtctagactgtggccacagcctctgccgagcctgcatcactgtgagcaacaaggaggcagtgaccagcatgggaggaaaaagcagctgtcctgtgtgtggtatcagttactcatttgaacatctacaggctaatcagcatctggccaacatagtggagagactcaaggaggtcaagttgagcccagacaatgggaagaagagagatctctgtgatcatcatggagagaaactcctactcttctgtaaggaggataggaagtattcaaggaatgtcaggagaaactccaggcagtcctcaagaggctgaagaaggaagaggaggaagctgagaagctggaagctgacatcagagaagagaaaacttcctggaagtatcaggtacaaactgagagacaaaggatacaaacagaatttgatcagcttagaagcatcctaaataatgaggagcagagagagctgcaaagattggaagaagaagaaaagaagacgctggataagtttgcagaggctgaggatgagctagttcagcagaagcagttggtgagagagctcatctcagatgtggagtgtcggagtcagtggtcaacaatggagctgctgcaggacatgagtggaatcatgaaatggagtgagatctggaggctgaaaaagccaaaaatggtttccaagaaactgaagactgtattccatgctccagatctgagtaggatgctgcaaatgtttagagaactgacagctgtccggtgctactgggtggatgtcacactgaattcagtcaacctaaatttgaatcttgtcctttcagaagatcagagacaagtgatatctgtgccaatttggccttttcagtgttataattatggtgtcttgggatcccaatatttctcctctgggaaacattactgggaagtggacgtgtccaagaaaactgcctggatcctgggggtatactgtagaacatattcccgccatatgaagtatgttgttagaagatgtgcaaatcgtcaaaatctttacaccaaatacagacctctatttggctactgggttatagggttacagaataaatgtaagtatggtgtctttgaagagtctttgtcctctgatcccgaggttttgactctctccatggctgtgcctccctgccgtgttggggttttcctcgactatgaagcaggcattgtctcatttttcaatgtcacaagccatggctccctcatttacaagttctctaaatgttgcttttctcagcctgtttatccatatttcaatccttggaactgtccagctcccatgactctatgcccaccaagctcttgaattttctcatttcttcacctacaaccctttgtctcgacttatctcctgcaactgactcatctgcaacattcacaccattgcttccttgtggtttcccttctttagaacttttactcatccttgagatgtatggtgtatttggcttgagttatgagagatgcttatttattcatttactctttttcatattttcagagaaagttacctaatccctcctaaagacacagcagtatgggtataacatccttgccttcccatttatccatgtttcactttatcactgatgtgaagaggcccaaagcctgttagccaccatccatgctacctaggtagtccataggaaccacccccatgaccaccaccaacatcaactaaaggttcttggagggtatgtcagtgtgttgctcaggataccccaggtacatcaaggaatcaaggagaggaaaatatgagcaatatgtgtattcagagtgaagattttatgtccagagtatttgagctcaaaccttgcctgttgttttctaatcatgatgaatactttctcagtttctttttcctgaaatataaattgggatttaagactgtacctaactattaagatcactgtgtaaaactaagtgtctctaaatgtaatgcatcgatttagtgtctggaacataataaatatttgctctcatgattgctaaaaaaaaaaaaaaaaaa

SEQ ID NO: 2333 - DNA, 944 bp, Homo sapiens
gagaggagagcctcaggagttaggaccagaagaagccagggaagcagtgcaatggcttcaaaaatcttgcttaacgtacaagaggaggtgacctgtcccatctgcctggagctgttgacagaacccttgagtctagactgtggccacagcctctgccgagcctgcatcactgtgagcaacaaggaggcagtgaccagcatgggaggaaaaagcagctgtcctgtgtgtggtatcagttactcatttgaacatctacaggctaatcagcatctggccaacatagtggagagactcaaggaggtcaagttgagcccagacaatgggaagaagagagatctctgtgatcatcatggagagaaactcctactcttctgtaaggaggataggaaagtcatttgctggctttgtgagcggtctcaggagcaccgtggtcaccacacagtcctcacggaagaagtattcaaggaatgtcaggagaaactccaggcagtcctcaagaggctgaagaaggaagaggaggaagctgagaagctggaagctgacatcagagaagagaaaacttcctggaagtatcaggtacaaactgagagacaaaggatacaaacagaatttgatcagcttagaagcatcctaaataatgaggagcagagagagctgcaaagattggaagaagaagaaaagaagacgctggataagtttgcagaggctgaggatgagctagttcagcagaagcagttggtgagagagctcatctcagatgtggagtgtcggagtcagtggtcaacaatggagctgctgcaggacatgagtggaatcatgaaatggtgcgtatgggtggccacgagtggtgcttgtgagttataaagaagtgtttgtagctattagagttatttggtggtcaattggaataaaaaatctcccagagtagtaaaaaaaaaaaaaaa

SEQ ID NO: 2334 - DNA, 4488 bp, Homo sapiens
gccgccgcgcccccagctgctctggttacggttggtgtttgcgaattctctgcggcaccttcttcgctgaactccaccgtcagttccataggcgcgcgcccgcgtcacgtgggccgaggttccggcgcggctgctggccggcggctgagccgggagaaaggagctgcggccaccgttcgccctacttctgcgcctcggggcgggcgcgccggtaaaaatggcgaaatgggggtaggcggcgctggacctgaagagatggggcgcgcaggtggggcggttgtcagagccccctgacgtgggcgccgggcttttatcggcgatttgatctggcgacctcgggccggcgcctaagaggtcagactgcggagcctgcgggtcgccagcggccccgccgagagccggaggcaatggatgaacagagcgtggagagcattgctgaggttttccgatgtttcatttgtatggagaaattgcgggatgcacgcctgtgtcctcattgctccaaactgtgttgtttcagctgtattaggcgctggctgacagagcagagagctcaatgtcctcattgccgtgctccactccagctacgagaactagtaaattgtcgttgggcagaagaagtaacacaacagcttgatactcttcaactctgcagtctcaccaaacatgaagaaaatgaaaaggacaaatgtgaaaatcaccatgaaaaacttagtgtattttgctggacttgtaagaagtgtatctgccatcagtgtgcactttggggaggaatgcatggcggacatacctttaaacctttggcagaaatttatgagcaacacgtcactaaagtgaatgaagaggtagccaaacttcgtcggcgtctcatggaactgatcagcttagttcaagaagtggaaaggaatgtagaagctgtaagaaatgcaaaagatgagcgtgttcgggaaattaggaatgcagtggagatgatgattgcacggttagacacacagctgaagaataagcttataacactgatgggtcagaagacatctctaacccaagaaacagagcttttggaatccttacttcaggaggtggagcaccagttgcggtcttgtagtaagagtgagttgatatctaagagctcagagatccttatgatgtttcagcaagttcatcggaagcccatggcatcttttgttaccactcctgttccaccagactttaccagtgaattagtgccatcttacgattcagctacttttgttttagagaatttcagcactttgcgtcagagagcagatcctgtttacagtccacctcttcaagtttcaggactttgctggaggttaaaagtttacccagatggaaatggagttgtgcgaggttactacttatctgtgtttctggagctctcagctggcttgcctgaaacttctaaatatgaatatcgtgtagagatggttcaccagtcctgtaatgatcctacaaaaaatatcattcgagaatttgcatctgactttgaagttggagaatgctggggctataatagatttttccgtttggacttactcgcaaatgaaggatacttgaatccacaaaatgatacagtgattttaaggtttcaggtacgttcaccaactttctttcaaaaatcccgggaccagcattggtacattactcagttggaagctgcacagactagttatatccaacaaataaacaaccttaaagagagacttactattgagctgtctcgaactcagaagtcaagagatttgtcaccaccagataaccatcttagcccccaaaatgatgatgctctggagacacgagctaagaagtctgcatgctctgacatgcttctcgaaggtggtcctactacagcttctgtaagagaggccaaagaggatgaagaagatgaggagaagattcagaatgaagattatcatcacgagctttcagatggagatctggatctggatcttgtttatgaggatgaagtaaatcagctcgatggcagcagttcctctgctagttccacagcaacaagtaatacagaagaaaatgatattgatgaagaaactatgtctggagaaaatgatgtggaatataacaacatggaattagaagagggagaactcatggaagatgcagctgctgcaggacccgcaggtagtagccatggttatgtgggttccagtagtagaatatcaagaagaacacatttatgctccgctgctaccagtagtttactagacattgatccattaattttaatacatttgttggaccttaaggaccggagcagtatagaaaatttgtggggcttacagcctcgcccacctgcttcacttctgcagcccacagcatcatattctcgaaaagataaagaccaaaggaagcaacaggcaatgtggcgagtgccctctgatttaaagatgctaaaaagactcaaaactcaaatggccgaagttcgatgtatgaaaactgatgtaaagaatacactttcagaaataaaaagcagcagtgctgcttctggagacatgcagacaagccttttttctgctgaccaggcagctctggctgcatgtggaactgaaaactctggcagattgcaggatttgggaatggaactcctggcaaagtcatcagttgccaattgttacatacgaaactccacaaataagaagagtaattcgcccaagccagctcgatccagtgtagcaggtagtctatcacttcgaagagcagtggaccctggagaaaatagtcgttcaaagggagactgtcagactctgtctgaaggctccccaggaagctctcagtctgggagcaggcacagttctccccgagccttgatacatggcagtatcggtgatattctgccaaaaactgaagaccggcagtgtaaagctttggattcagatgctgttgtggttgcagttttcagtggcttgcctgcggttgagaaaaggaggaaaatggtcaccttgggggctaatgctaaaggaggtcatctggaaggactgcagatgactgatttggaaaataattctgaaactggagagttacagcctgtactacctgaaggagcttcagctgcccctgaagaaggaatgagtagcgacagtgacattgaatgtgacactgagaatgaggagcaggaagagcataccagtgtgggcgggtttcacgactccttcatggtcatgacacagcccccggatgaagatacacattccagttttcctgatggtgaacaaataggccctgaagatctcagcttcaatacagatgaaaatagtggaaggtaattgccaaatcaagagaactgacttgcaagctaccttgaccctgaattttgctgtagttggtgctcaaatttgtcatcagtcagataatcagatttggtcttatttcttcattatctcgacctgaaatagtaatttggaaactgttggaaggtggcacagtttagtctaagacagcagtagtacatgggaaaaacagtatgggaagagttctttgtaatgtaaggaaataacaatgtagttctctattaatttagcaaatttgtacattcacaaaaggcagtttgtctactacagcagaaggctggttaactgccagaaaatgtacctccaggccctgcatgccgtcagtaacccgcccggcattggtgctctactgtctttggctagagcttagttgtgtttaaataatcatctttatatttggggttttaattacagttccattagtgcctgtagattagtgaacagaaaattgctttggaagagattctgccctgtagacactatgtgaataactgaagtaacactagactgaatctcctttttggagtatgtatcttctctcacttgttcaagtacaggcacactgttcaaccgcatggtatctttctgttgtgtgacttctacaaatgtaattttaaatgaaattaagttaacatggattcattacgttcctggccctgtagacacgtgtaagattatttaaaattctttcatttttttctgcctcttactatacgactgtagtgcaacaaatattttaaagcccccttttcttctttattttcattagttgtacattgatttcagtgtcaacacatttaaagattcattcatgttgcacagtggcttacatgaacgtgaaactgtgatataaggttttctttcatactcataattagcccaaaacagttgccaaactttgccattgtgctcctgcatttgtgtttgagctgctatatatttgtggaaattacactgaaagttgactaagagactattgaaaaagcatgaataattaaatatacatgtgagagacatctcatctgctgtattttacttagtgaatattgttcactcttccgtgtctgatgtcttgctgaatgctgtgactcatagtttacttttgttcaaaatagtttgcactttttgttaataaaatcaacttgagaaaaaaaaaaaaaaa

SEQ ID NO: 2335 - DNA, 2047 bp, Homo sapiens
agagcatgatggggcacgcgcggtagcgcgaggcggggcatgtaaccatagcgtgcgggtcatgatgaggcacggacgtggggggttaggtggggcacgtaattggagctcgcggggcaggatggggcatctagctggagcgacagagagcacgatggggcacttacaggggccggaggctggcccgggcagtgagtgtggatggcttggcaggtgagcctgctggagctggaggactggcttcagtgtcccatctgcctggaggtcttcaaggagcccctgatgctgcagtgtggccactcttactgcaagggctgcctggtttccctgtcctgccacctggatgccgagctgcgctgccccgtgtgccggcaggcggtggacggcagcagctccctgcccaacgtctccctggccagggtgatcgaagccctgaggctccctggggacccggagcccaaggtctgcgtgcaccaccggaacccgctcagccttttctgcgagaaggaccaggagctcatctgtggcctctgcggtctgctgggctcccaccaacaccacccggtcacgcccgtctccaccgtctacagccgcatgaaggaggagctcgcagccctcatctctgagctgaagcaggagcagaaaaaggtggatgagctcatcgccaaactggtgaacaaccggacccgaatcgtcaatgagtcggatgtcttcagctgggtgatccgccgcgagttccaggagctgcaccacctggtggatgaggagaaggcccgctgcctggaggggatagggggtcacacccgtggcctggtggcctccctggacatgcagctggagcaggcccagggaacccgggagcggctggcccaagccgagtgtgtgctggaacagttcggcaatgaggaccaccacaagttcatccggaagttccactccatggcctccagagcagagatgccgcaggcccggcccttagaaggcgcattcagccccatctccttcaagccaggcctccaccaggctgacatcaagctgaccgtgtggaaaaggctcttccggaaagttttgccagccccggagcctctcaagttggaccctgccactgcccacccactcctggagctctccaagggcaacacggtggtgcagtgcgggcttctggcccagcggcgagccagccagcctgagcgcttcgactacagcacctgcgtcctggccagccgcggcttctcctgcggccgccactactgggaggtggtggtgggcagcaagagcgactggcgcctgggggtcatcaagggcacagccagccgtaagggcaagctgaacaggtcccccgagcacggcgtgtggctgatcggcctgaaggagggccgggtgtacgaagcctttgcctgcccccgggtacccctgcccgtggccggccacccccaccgcatcgggctctacctgcactatgagcagggcgaactcaccttcttcgatgccgaccgccccgatgacctgcggccgctctacaccttccaggccgacttccagggcaagctctaccccatcctggacacctgctggcacgagaggggcagcaactcgctgcccatggtgctgcccccgcccagcgggcctggccccctcagccccgagcagcccaccaagctgtagggccgcccggagtcctgccggcccacaggcccatcccggcggggcaccggggactcgcgggcttctgctgggtcccgcctgaggtgatatcgtcactgtttaggaaggtcttcaggcctgtgtgtccctggaacatgtaatgatagggaacaggaccccagtccctttcccctcagccaagggtgtatttgtaaacttcggcccccaggccttggcagccagggacacactgaaatccccatggttcctgccacttgctaaccatgctatctgcgcagacgcttccgagggcagaaatagtcccatgtataccttttccatattactgtgaactttcaactactatcaaggataataaatttgacattatttctttctcttt

SEQ ID NO: 2336 - DNA, 1764 bp, Homo sapiens
agaattcgggcaccaggagaaggaagccaacaggatccgacccggtgttttgtgacaaaggcaagacccccaggtctacttagagcaaagttagtagaggaggcagctaggcgtggctctcattccttcccacagaatggattataagtcgagcctgatccaggatgggaatcccatggagaacttggagaagcagctgatctgccctatctgcctggagatgtttaccaagccagtggtcatcttgccgtgccagcacaacctgtgccggaagtgtgccaatgacatcttccaggctgcaaatccctactggaccagccggggcagctcagtgtccatgtctggaggccgtttccgctgccccacctgccgccacgaggtgatcatggatcgtcacggagtgtacggcctgcagaggaacctgctggtggagaacatcatcgacatctacaaacaggagtgctccagtcggccgctgcagaagggcagtcaccccatgtgcaaggagcacgaagatgagaaaatcaacatctactgtctcacgtgtgaggtgcccacctgctccatgtgcaaggtgtttgggatccacaaggcctgcgaggtggccccattgcagagtgtcttccagggacaaaagactgaactgaataactgtatctccatgctggtggcggggaatgaccgtgtgcagaccatcatcactcagctggaggattcccgtcgagtgaccaaggagaacagtcaccaggtaaaggaagagctgagccagaagtttgacacgttgtatgccatcctggatgagaagaaaagtgagttgctgcagcggatcacgcaggagcaggagaaaaagcttagcttcatcgaggccctcatccagcagtaccaggagcagctggacaagtccacaaagctggtggaaactgccatccagtccctggacgagcctgggggagccaccttcctcttgactgccaagcaactcatcaaaagcattgtggaagcttccaagggctgccagctggggaagacagagcagggctttgagaacatggacttctttactttggatttagagcacatagcagacgccctgagagccattgactttgggacagatgaggaagaggaagaattcattgaagaagaagatcaggaagaggaagagtccacagaagggaaggaagaaggacaccagtaaggagctggatgaatgagaggcccccagatgcagagagactggagagggtggggaggggcccagcggccttggtgacaggcccagggtgggaggggtcggggcccctggaggggcaatggggaggtgatgtcttctctctgctcagagagcagggactagggtaggaccctcaccgctgcgtccagcagacactgaaccagaattggaaacgtgcttgaaacaatcacacaggacacttttctacattggtgcaaaatggaatattttgtacatttttaaaatgtgatttttgtatatacttgtatatgtatgccaatttggtgctttttgtaaaggaacttttgtataataatgcctggtcattgggtgacctgcgattgtcagaaagaggggaaggaagccaggttgatacagctgcccacttcctttcctgagcaggaggatggggtagcactcacagggacgatgtgctgtatttcagtgtctatcccagacatacggggtggtaactgagtttgtgttatatgttgttttaataaatgcacaatgctctcttcctgttcttc

SEQ ID NO: 2337 - DNA, 3321 bp, Homo sapiens
gctgcgggctactgggcctgcgctgccgggctttgggttctgggcctctgccgctctctggccctaagtgctgagctgccgggaacggcagcttctgacgctgggccattggacgctgcggaaccaggcttcttcactttgagtttccgccgcgaagcgccagtccgggccgaggagggagcctttactacttctccctggtttcattcatgttctgaggagggtgtgagaaggaaccatggatcccacagccttggtggaagccattgtggaagaagtggcctgtcccatctgtatgaccttcctgagggagcccatgagcattgactgtggccacagcttctgccacagctgtctctctggactctgggagatcccaggagaatcccagaactggggttacacctgtcccctctgtcgagctcctgtccagccaaggaacctgcggcctaattggcagctggccaatgttgtagaaaaagtccgtctgctaaggctacatccaggaatggggctgaagggtgacctgtgtgagcgccatggggaaaagctgaagatgttctgcaaagaggatgtcttgataatgtgtgaggcctgcagccagtccccagagcatgaggcccacagtgttgtgccaatggaggatgttgcctgggagtacaagtgggaacttcatgaggccctcgaacatctgaagaaagagcaagaagaggcctggaagcttgaagttggtgaaaggaaacgaactgccacctggaagatacaggtggaaacccgaaaacagagtattgtatgggagtttgaaaaataccagcgattactagagaaaaagcagccaccacatcggcagctgggggcagaggtagcagcagctctggccagcctacagcgggaggcagcggagaccatgcagaaactggagttgaaccatagcgagctcatccagcagagccaggtcctgtggaggatgattgcagagttgaaagagaggtcgcagaggcctgtccgctggatgttgcaggatattcaggaagtgttaaacaggagcaaatcttggagcttgcagcagccagaaccaatctccctggagttgaagacagattgccgtgtgctggggctaagagagatcctgaagacttatgcagctgatgtgcgcttggatccagatactgcttactcccgtctcatcgtgtctgaggacagaaaacgtgtgcactatggagacaccaaccagaaactgccagacaatcctgagagattttaccgctataatatcgtcctgggaagccagtgcatctcctcaggccggcactactgggaggtggaggtgggagacaggtctgagtggggcctgggagtatgtaagcaaaatgtagaccggaaggaggtggtctacttatccccccactatggattctgggtgataaggctgaggaagggaaatgagtaccgagcaggcaccgatgagtacccaatcctgtccttgccggtccctcctcgccgggtgggaatcttcgtggattatgaggcccatgacatttctttctacaatgtgactgactgtggctcccacatcttcactttcccccgctatcccttccctgggcgcctcctgccctattttagtccttgctacagcattggaaccaacaacactgctcctctggccatctgctccctggatggggaggactaagaaagctaccaccctaaccacagaggcttggaattgggcctggcccccatggggcttggaggaccgagccactgacaggtatcccctgaaactgagctgagcccagtatccaaggattcctctgtctgatcctttggtctttgctaccaggctgaagtctgtcatgaaaccacttattttaaaaagcagaggcccagtcaaatgagcattgcatcccatgagggaagcacgacagggctgatggtgaggatcagagcagttctaaggtgactcgttggggtaaggatcaggactttgtccatgtagtagccaaccaccctcttccctgattcccgtccggtgtcacagttcagtcagtgaggatgatgaagtagatacagtcttcaggacaccattagatgggctttcccaataggccaaaaaaatgctgcgcatacccagagctggttgttgtgctgaggccagtcagaggatgcttcccctgaggtttgctataactaagcaacctttatgtgactctcaccttctgacctcctggcaagagaaattcagtgcagcagggggacacagacctgcccaagccaccccactgccgttccctctctgagcacaagctgggcaaatcactgtcccttggactccaggagaccagtgtcctagtcttgccttttttctctaagtggcaggatcagaaaacctgcgagctttagtttgtattttcactttatgaatgaggaaactgaaatggccttaagggagcaagttatttctttttttttgacacggagtctcactctgttgcccaggctggagtgcagtggcacgatctcggctcactgcaggctctgcctcctgggttcacgccattctcctgcctcagcttcccgagtagctgggactacaggcgcccaccacgacgcctggctcatttttttgtatttttagtagagacggagtttcaccatgttagctaggatggtctcgatctcctgacctcatgatccgccctcctcagcctcccacagtgctgggattagaggcatgagccactgcgcccggcccctggagcaagttatttcttacaaagctgctgaaggtaagattatcaaaattataaagcatttttcacactcaagtgaaacaaggttgacaaactcacttcgcaggtcacatgcctatacatcacttattatatttgggtctgaaacttctcacatgtttgggaggttttatgtgtcctcattgggaaaatgggtgtaattcagcataaaacctcatatgattgtcctgcctcatggagctgttgtatagatcccagatccatcccatgatttgttcctgtctgaggcatagaggcaggcaagccgtggattttgcacatggtgactttcccactgtgccatgatacagtctgcatcttatagcagtgcctttgtctcagggcctctgctggcagtctagaccttttgggcagaaaggagcttcaaatggctgtgataaggaatattaaaaattgtgtttctactttaattgtattggctgttcatgtatgtaggagttaaaataggccaaactggagaaataaacgcattctgtccaccatgaaaaaaaaaaaaaaaaaaaaa

SEQ ID NO: 2338 - DNA, 2040 bp, Homo sapiens
ggacgtggggcttttgcagctcagctggttccggctggggaagatggcggtggctggggcggtgtccggggagccgctggtgcactggtgcacccagcagttgcggaagactttcggcctggatgtcagcgaggagatcattcagtacgttttgtcaattgagagtgctgaagagatacgagaatatgttactgatctcctccagggaaatgaaggcaaaaaaggtcaattcatagaagaacttataaccaaatggcaaaagaatgatcaggagttgatttcggatcctttgcagcagtgcttcaaaaaagatgaaattttagatgggcagaaatcaggcgaccatctaaagcggggtaggaagaaagggagaaacagacaggaagttcctgcatttactgaacctgacacgactgcagaggttaaaacaccttttgatttggccaaggcacaagagaacagcaactccgtaaagaagaagacaaagtttgtcaatttatacacaagagagggacaggacaggcttgcagtcctgctccctggtcgtcacccttgtgattgcctgggccagaagcacaagctcatcaataactgtctgatctgtgggcgcattgtctgtgaacaagaaggctcaggcccttgcttattctgtggcactctggtgtgtactcatgaggaacaagatattttacagcgtgactcaaacaagagccagaaactgctaaagaaactcatgtcaggagtggagaattctggaaaggtggacatctctaccaaggaccttcttcctcatcaagaattgcgaattaagtctggtctggagaaggctatcaagcataaagacaaactgttagagtttgacagaactagtattcgaaggacccaagtcattgatgatgagtcagattactttgccagtgattctaaccaatggttgtccaaacttgagcgggaaaccttgcagaagcgagaggaggagctgagagaacttcgacacgcctctcgactttctaagaaggtcaccattgactttgcaggaaggaagatcctggaagaagaaaattcactagcagagtatcatagcagactagatgagacaatacaggccattgccaatggaaccttgaaccagccactgaccaaattggatagatcttctgaagagcctttgggagttctggtaaatcccaacatgtaccagtcccctccccagtgggttgaccacacaggtgcagcctcacagaagaaggctttccgttcttcaggatttggactagagttcaactcatttcagcaccagctgcgaatccaggatcaagaatttcaggaaggctttgatggtggctggtgcctctctgtacatcagccctgggcttctctgcttgtcagagggattaaaagggtggagggcagatcctggtacaccccccacagaggacgactttggatagcagccacagctaaaaaaccctcccctcaagaagtctcagaactccaggctacatatcgtcttcttcgtgggaaagatgtggaatttcctaatgactatccgtcaggttgtcttctgggctgtgtggacctaattgactgcttgtcccagaagcaatttaaggagcagtttccagacatcagtcaagaatctgattctccatttgttttcatctgcaaaaatcctcaggaaatggttgtgaagtttcctattaaaggaaatccaaaaatctggaaattggattccaagatccatcaaggagcaaagaaggggttaatgaagcagaataaagctgtctgacccaggagaaaaggaactatacagcatagtggagttttgtgtactaaaattgctatctactggtcctttggaattgaagtagtagaaacctaaaggcttggcgtcaggcttgaatatctcagaacttaaactcttaccaaaatctgtatatttttcttaaggagtgggattcctactttatgtaatggggtcgaaatctttgaacacattatttataaaaacctgtttaaaaattctaaaaaaaaaaaaaa

SEQ ID NO: 2339 - DNA, 1864 bp, Homo sapiens
gggggctgcggcaacagcggggccgatgtgtagttggtgactgcctctccagatgctgaggtgcctgtatcattggcacaggccagtgctgaaccgtaggtggagtaggctgtgccttctgaagcagtatctattcacaatgaagttgcagtctcccgaattccagtcacttttcacagaaggactgaagagtctgacagaattatttgtcaaagagaatcacgaattaagaatagcaggaggagcagtgagggatttattaaatggagtaaagcctcaggatatagattttgccaccactgctacccctactcaaatgaaggagatgtttcagtcggctgggattcggatgataaacaacagaggagaaaagcacggaacaattactgccaggcttcatgaagaaaattttgagattactacactacggattgatgtcaccactgatggaagacatgctgaggtagaatttacaactgactggcagaaagatgcggaacgcagagatctcactataaattctatgtttttaggttttgatggcactttatttgactactttaatggttatgaagatttaaaaaataagaaagttagatttgttggacatgctaaacagagaatacaagaggattatcttagaattttaagatacttcaggttttatgggagaattgtagacaaacctggtgaccatgatcctgagactttggaagcaattgcagaaaatgcaaaaggcttggctggaatatcaggagaaaggatttgggtggaactgaaaaaaattcttgttggtaaccatgtaaatcatttgattcaccttatctatgatcttgatgtggctccttatataggtttacctgctaatgcaagtttagaagaatttgacaaagtcagtaaaaatgttgatggtttttcaccaaagccagtgactcttttggcctcattattcaaagtacaagatgatgtcacaaaattggatttgaggttgaagatcgcgaaagaggagaaaaaccttggcttatttatagttaaaaataggaaagatttaattaaagcaacagatagttcagacccattgaaaccctatcaagacttcattatagattctagggaacctgatgcaactactcgtgtatgtgaactactgaagtaccaaggagagcactgtctcctaaaggaaatgcagcagtggtccattcctccatttcctgtaagtggccatgacatcagaaaagtgggcatttcttcaggaaaagaaattggggctctattacaacagttgcgagaacagtggaaaaaaagtggttaccaaatggaaaaagatgaacttctgagttacataaagaagacctaaaactgatggctactaaaaagcagagcatttctgccagtcataacatctttgtactctatgagcaaatagtaattttggaccttgataaaacaattttgtagagtgtaatatttctaagaggaaatgtcacaggggctatgatgcaagaaagcctcagaaatgactgcatacaggaaataatctcatcatttccaaagatgtcttcatgtcccatcaatgacatgctaccagacatatcagattccacaggataatggcaccaagctacccaagtagatgtttctggtattctagactgccgttcatgcttgtttcctaaagtatacttaaaagtttcaaatacagtttcacttagaaactgcaaccctccaagtaatgttatgtttacttaggtattaatgttatgtttacttaggtatgtatcagaggcaataatttccaaagcagatcttagaatataaccaatttgttagataacaaaaaaaaaaaaaaaaaaaaaaaaaaaaa

SEQ ID NO: 2340 - DNA, 2291 bp, Homo sapiens
gttggtgacgtcaccgcgttcaccagcccggaagtgcgcgtggcggcggtggcggctgcggcaacagcggggccgatgtgtagttggtgactgcctctccagatgctgaggtgcctgtatcattggcacaggccagtgctgaaccgtaggtggagtaggctgtgccttctgaagcagtatctattcacaatgaagttgcagtctcccgaattccagtcacttttcacagaaggactgaagagtctgacagaattatttgtcaaagagaatcacgaattaagaatagcaggaggagcagtgagggatttattaaatggagtaaagcctcaggatatagattttgccaccactgctacccctactcaaatgaaggagatgtttcagtcggctgggattcggatgataaacaacagaggagaaaagcacggaacaattactgccaggcttcatgaagaaaattttgagattactacactacggattgatgtcaccactgatggaagacatgctgaggtagaatttacaactgactggcagaaagatgcggaacgcagagatctcactataaattctatgtttttaggttttgatggcactttatttgactactttaatggttatgaagatttaaaaaataagaaagttagatttgttggacatgctaaacagagaatacaagaggattatcttagaattttaagatacttcaggttttatgggagaattgtagacaaacctggtgaccatgatcctgagactttggaagcaattgcagaaaatgcaaaaggcttggctggaatatcaggagaaaggatttgggtggaactgaaaaaaattcttgttggtaaccatgtaaatcatttgattcaccttatctatgatcttgatgtggctccttatataggtttacctgctaatgcaagtttagaagaatttgacaaagtcagtaaaaatgttgatggtttttcaccaaagccagtgactcttttggcctcattattcaaagtacaagatgatgtcacaaaattggatttgaggttgaagatcgcaaaagaggagaaaaaccttggcttatttatagttaaaaataggaaagatttaattaaagcaacagatagttcagacccattgaaaccctatcaagacttcattatagattctagggaacctgatgcaactactcgtgtatgtgaactactgaagtaccaaggagagcactgtctcctaaaggaaatgcagcagtggtccattcctccatttcctgtaagtggccatgacatcagaaaagtgggcatttcttcaggaaaagaaattggggctctattacaacagttgcgagaacagtggaaaaaaagtggttaccaaatggaaaaagatgaacttctgagttacataaagaagacctaaaactgatggctactaaaaagcagagcatttctggtaagactaaattttctcccctccctcttaatgaggttttagagactacaccagaataaaagacagtttaggggacctctgtagaacaacaagggtcttattttgtgaattatatatttcaagaactaaacagagatccacctttctggatctgatttatatcactgaaatgtacagttcttttggaatagtttcacctgagaaaacatagttggctattatctatcttaacctgttcaggcttttaaaaaaaactgtttttgcatagggtagtactaagatcttaaaaagtggtaactgtcttgaagaaaaaacgtttattgtttgtttgcaattgaaataacagggttaccttaacaatgactgtctatgatgtgtcagttcttatctgaattccaaaataaacctgtgcttaaaaaagaaataattgaccaagtaagtttgcataaaatgtgaatactaaatgtgtccccagttgctggcattcatatgtacaggatttgttctagcaagctatgcttcagtatgtggttgatatttttctgtcacaatgatttctttatgcatgcagagcctggggaagtcatgggattaacttgagggtcactattgagcctattaattaattattgttttaataaaacaaacattggtattggaagataaatatgtttatgtggtatctgacaatgtgtattaggtgtcatatacaatggtaatatgcctgtctttaaagtgttattttattaattaaaaggatatggctattattatatattctctaaagatttgagtcctaaatgctttcatcaggtaaataaaatgtataatacaaaaaaaaaaaaaaaaaa

SEQ ID NO: 2341 - DNA, 3870 bp, Homo sapiens
gaggaggagcctcgggccgagccaccgccttcgccgcggaccttcagctgccgcggtcgctccgagcggcgggccgcagagccaccaaaatgccagaagagatggacaagccactgatcagcctccacctggtggacagcgatagtagccttgccaaggtccccgatgaggcccccaaagtgggcatcctgggtagcggggactttgcccgctccctggccacacgcctggtgggctctggcttcaaagtggtggtggggagccgcaaccccaaacgcacagccaggctgtttccctcagcggcccaagtgactttccaagaggaggcagtgagctccccggaggtcatctttgtggctgtgttccgggagcactactcttcactgtgcagtctcagtgaccagctggcgggcaagatcctggtggatgtgagcaaccctacagagcaagagcaccttcagcatcgtgagtccaatgctgagtacctggcctccctcttccccacttgcacagtggtcaaggccttcaatgtcatctctgcctggaccctgcaggctggcccaagggatggtaacaggcaggtgcccatctgcggtgaccagccagaagccaagcgtgctgtctcggagatggcgctcgccatgggcttcatgcccgtggacatgggatccctggcgtcagcctgggaggtggaggccatgcccctgcgcctcctcccggcctggaaggtgcccaccctgctggccctggggctcttcgtctgcttctatgcctacaacttcgtccgggacgttctgcagccctatgtgcaggaaagccagaacaagttcttcaagctgcccgtgtccgtggtcaacaccacactgccgtgcgtggcctacgtgctgctgtcactcgtgtacttgcccggcgtgctggcggctgccctgcagctgcggcgcggcaccaagtaccagcgcttccccgactggctggaccactggctacagcaccgcaagcagatcgggctgctcagcttcttctgcgccgccctgcacgccctctacagcttctgcttgccgctgcgccgcgcccaccgctacgacctggtcaacctggcagtcaagcaggtcttggccaacaagagccacctctgggtggaggaggaggtctggcggatggagatctacctctccctgggagtgctggccctcggcacgttgtccctgctggccgtgacctcactgccgtccattgcaaactcgctcaactggagggagttcagcttcgttcagtcctcactgggctttgtggccctcgtgctgagcacactgcacacgctcacctacggctggacccgcgccttcgaggagagccgctacaagttctacctgcctcccaccttcacgctcacgctgctggtgccctgcgtcgtcatcctggccaaagccctgtttctcctgccctgcatcagccgcagactcgccaggatccggagaggctgggagagggagagcaccatcaagttcacgctgcccacagaccacgccctggccgagaagacgagccacgtatgaggtgcctgccctgggctctggaccccgggcacacgagggacggtgccctgagcccgttaggttttcttttcttggtggtgcaaagtggtataactgtgtgcaaataggaggtttgaggtccaaattcctgggactcaaatgtatgcagtactattcagaatgatatacacacatatgtgtatatgtatttacatatattccacatatataacaggatttgcaattatacatagctagctaaaaagttgggtctctgagatttcaacttgtagatttaaaaacaagtgccgtacgttaagagaagagcagatcatgctattgtgacatttgcagagatatacacacactttttgtacagaagaggcttgtgctgtggtgggttcgatttatccctgcccaccccacccccacaacttcccttttgctacttccccaaggctcttgcagagctagggctctgaaggggagggaaggcaacggctctgcccagagccatccctggagcatgtgagcagcggctggtctcttccctccacctggggcagcagcaggaggcctggggaggaggaaaatcaggcagtcggcctggagtctgtgcctggtcctttgcccggtggtgggaggatggagggattgggctgaagctgctccacctcatccttgctgagtgggggagacattttccctgaaagtcagaagtcaccatagagcctgcaaatggatcctcctgtgagagtgacgtcacctcctttccagagccattagtgagcctggcttgggaacaagtgtaatttccttccctcctttaacctggcgatgagcgtcctttaaaccactgtgccttctcaccctttccatcttcagtttgaatgactcccaggaaggcctagagcagaccctttagaaatcagcccaagggggagagcaagagaaaacactctagggagtaaagctccccgggcgtcagagttgagccctgcctgggctgaaggactgtcttcacgaagtcagtcctgaggaaaaatattggggactccaaatgtcctctggcagaggacccagaaaaccacactggctccaacttcctcctcatggggcattacacttcaaaacagtggggagcaacttttccaccaaagctacaaacctaaaatgctgctgccccaaagcacaagagggaagagcaccgccggggccacaggacgtctgtcctccagtcacaggccatccttgctgctccctactgactctagcttacttcccctgtgaagaaacaggtgttctcggctgagcccccaaccctctgcagaaccaggttgatctgccacagaaaaagcatctttgaagacaaagagggtgaggtcttcatgagtctcctgggcccaaagccatcttctgatggaaggaagagagtagggccagtgaaggctgcccagagagaatgtcacagatgaggctgcccctgccccccccccgccagggaggtttcatgagctcatgtctatgcagcacataagggttcttcagtgaaaagcaggagaagagcccactgcaaggatagctcattaggcacatgaccgatgcagggaaggccatgccggggaagctcttcctgcaggtattttccatctgctgtgccaaggctgagcggcagaaacttgtctcataaattggcactgatggagcatcagctgtggcccacagagagccttgctgagaagggggcaggtaaagcagagattttagcattgccttggcataacaagggcccatcgattccctactaatgagaggcagggagagcatgggcaatggagacccaccaatgatccccaaccccggtgggtactggctgcctgccctgggccagggaatggctccttataccaaagatgctggcacatagcagaacccagtgcacgtcctccccttcccacccacctctggctgaaggtgctcaagagggaagcaattataaggtgggtggcaggagggaacaggtgccacctgctggacaatcacacgaaaggcaggcgggctgtgtactgggccctgactgtgcgtccactgctgtcttccctacctcaccaggctactggcagcagcatcccgagagcacatcatctccacagcctggtaaattccatgtgcctctgggtacaaaagtgcctcaacgacatgctctggaaatcccaaatgccacagtctgaggttgatatctaaaatctatgccttcaaaagagtctctgttttttttttttaacctggtagacagtataaaagcagtgcaaataaacacctaaccttctgcaaa

SEQ ID NO: 2342 - DNA, 1550 bp, Homo sapiens
gtagtggtgccgacttcctgttgtttgaggccgggttgggggtgtgcgattgtgtgggacggtctggggcagcccagcagcggctgaccctctgcctgcggggaagggagtcgccaggcggccgtcatggcggtgtcggagagccagctcaagaaaatggtgtccaagtacaaatacagagacctaactgtacgtgaaactgtcaatgttattactctatacaaagatctcaaacctgttttggattcatatgtttttaacgatggcagttccagggaactaatgaacctcactggaacaatccctgtgccttatagaggtaatacatacaatattccaatatgcctatggctactggacacatacccatataatccccctatctgttttgttaagcctactagttcaatgactattaaaacaggaaagcatgttgatgcaaatgggaagatatatcttccttatctacatgaatggaaacacccacagtcagacttgttggggcttattcaggtcatgattgtggtatttggagatgaacctccagtcttctctcgtcctatttcggcatcctatccgccataccaggcaacggggccaccaaatacttcctacatgccaggcatgccaggtggaatctctccatacccatccggataccctcccaatcccagtggttacccaggctgtccttacccacctggtggtccatatcctgccacaacaagttctcagtacccttctcagcctcctgtgaccactgttggtcccagtagggatggcacaatcagcgaggacaccatccgagcctctctcatctctgcggtcagtgacaaactgagatggcggatgaaggaggaaatggatcgtgcccaggcagagctcaatgccttgaaacgaacagaagaagacctgaaaaagggtcaccagaaactggaagagatggttacccgtttagatcaagaagtagccgaggttgataaaaacatagaacttttgaaaaagaaggatgaagaactcagttctgctctggaaaaaatggaaaatcagtctgaaaacaatgatatcgatgaagttatcattcccacagctcccttatacaaacagatcctgaatctgtatgcagaagaaaacgctattgaagacactatcttttacttgggagaagccttgagaaggggcgtgatagacctggatgtcttcctgaagcatgtacgtcttctgtcccgtaaacagttccagctgagggcactaatgcaaaaagcaagaaagactgccggtctcagtgacctctactgacttctctgataccagctggaggttgagctcttcttaaagtattcttctcttccttttatcagtaggtgcccagaataagttattgcagtttatcattcaagtgtaaaatattttgaatcaataatatattttctgttttcttttggtaaagactggcttttattaatgcactttctatcctctgtaaactttttgtgctgaatgttgggactgctaaataaaatttgttgcataaaaaaaaaaaaaaaaaa

SEQ ID NO: 2343 - DNA, 4209 bp, Homo sapiens
ccgccgcggagcgaggttgcctggagagagcgcctgggcgcagaagggttaacgggccaccgggggctcgcagagcaggagggtgctctcggacggtgtgtcccccactgcactcctgaacttggaggacagggtcgccgcgagggacgcagagagcaccctccacgcccagatgcctgcgtagtttttgtgaccagtccgctcctgcctccccctggggcagtagagggggagcgatggagaactggactggcaggccctggctgtatctgctgctgcttctgtccctccctcagctctgcttggatcaggaggtgttgtccggacactctcttcagacacctacagaggagggccagggccccgaaggtgtctggggaccttgggtccagtgggcctcttgctcccagccctgcggggtgggggtgcagcgcaggagccggacatgtcagctccctacagtgcagctccacccgagtctgcccctccctccccggcccccaagacatccagaagccctcctcccccggggccagggtcccagaccccagacttctccagaaaccctccccttgtacaggacacagtctcggggaaggggtggcccacttcgaggtcccgcttcccacctagggagagaggagacccaggagattcgagcggccaggaggtcccggcttcgagaccccatcaagccaggaatgttcggttatgggagagtgccctttgcattgccactgcaccggaaccgcaggcaccctcggagcccacccagatctgagctgtccctgatctcttctagaggggaagaggctattccgtcccctactccaagagcagagccattctccgcaaacggcagcccccaaactgagctccctcccacagaactgtctgtccacaccccatccccccaagcagaacctctaagccctgaaactgctcagacagaggtggcccccagaaccaggcctgcccccctacggcatcaccccagagcccaggcctctggcacagagcccccctcacccacgcactccttaggagaaggtggcttcttccgtgcatcccctcagccacgaaggccaagttcccagggttgggccagtccccaggtagcagggagacgccctgatccttttccttcggtccctcggggccgaggccagcagggccaagggccttggggaacgggggggactcctcacgggccccgcctggagcctgaccctcagcacccgggcgcctggctgcccctgctgagcaacggcccccatgccagctccctctggagcctctttgctcccagtagccctattccaagatgttctggggagagtgaacagctaagagcctgcagccaagcgccctgcccccctgagcagccagacccccgggccctgcagtgcgcagcctttaactcccaggaattcatgggccagctgtatcagtgggagcccttcactgaagtccagggctcccagcgctgtgaactgaactgccggccccgtggcttccgcttctatgtccgtcacactgaaaaggtccaggatgggaccctgtgtcagcctggagcccctgacatctgtgtggctggacgctgtctgagccccggctgtgatgggatccttggctctggcaggcgtcctgatggctgtggagtctgtgggggtgatgattctacctgtcgccttgtttcggggaacctcactgaccgagggggccccctgggctatcagaagatcttgtggattccagcgggagccttgcggctccagattgcccagctccggcctagctccaactacctggcacttcgtggccctgggggccggtccatcatcaatgggaactgggctgtggatccccctgggtcctacagggccggcgggaccgtctttcgatataaccgtcctcccagggaggagggcaaaggggagagtctgtcggctgaaggccccaccacccagcctgtggatgtctatatgatctttcaggaggaaaacccaggcgttttttatcagtatgtcatctcttcacctcctccaatccttgagaaccccaccccagagccccctgtcccccagcttcagccggagattctgagggtggagcccccacttgctccggcaccccgcccagcccggaccccaggcaccctccagcgtcaggtgcggatcccccagatgcccgccccgccccatcccaggacacccctggggtctccagctgcgtactggaaacgagtgggacactctgcatgctcagcgtcctgcgggaaaggtgtctggcgccccattttcctctgcatctcccgtgagtcgggagaggaactggatgaacgcagctgtgccgcgggtgccaggcccccagcctcccctgaaccctgccacggcaccccatgccccccatactgggaggctggcgagtggacatcctgcagccgctcctgtggccccggcacccagcaccgccagctgcagtgccggcaggaatttggggggggtggctcctcggtgcccccggagcgctgtggacatctcccccggcccaacatcacccagtcttgccagctgcgcctctgtggccattgggaagttggctctccttggagccagtgctccgtgcggtgcggccggggccagagaagccggcaggttcgctgtgttgggaacaatggtgatgaagtgagcgagcaggagtgtgcgtcaggccccccgcagccccccagcagagaggcctgtgacatggggccctgtactactgcctggttccacagcgactggagctccaagtgctcagccgagtgtgggacgggaatccagcggcgctctgtggtctgccttgggagtggggcagccctcgggccaggccagggggaagcaggagcaggaactgggcagagctgtccaacaggaagccggccccctgacatgcgcgcctgcagcctggggccctgtgagagaacttggcgctggtacacagggccctggggtgagtgctcctccgaatgtggctctggcacacagcgtagagacatcatctgtgtatccaaactggggacggagttcaacgtgacttctccgagcaactgttctcacctccccaggccccctgccctgcagccctgtcaagggcaggcctgccaggaccgatggttttccacgccctggagcccatgttctcgctcctgccaagggggaacgcagacacgggaggtccagtgcctgagcaccaaccagaccctcagcacccgatgccctcctcaactgcggccctccaggaagcgcccctgtaacagccaaccctgcagccagcgccctgatgatcaatgcaaggacagctctccacattgccccctggtggtacaggcccggctctgcgtctacccctactacacagccacctgttgccgctcttgcgcacatgtcctggagcggtctccccaggatccctcctgaaaggggtccggggcaccttcacggttttctgtgccaccatcggtcacccattgatcggcccactctgaaccccctggctctccagcctgtcccagtctcagcagggatgtcctccaggtgacagagggtggcaaggtgactgacacaaagtgactttcagggctgtggtcaggcccatgtggtggtgtgatgggtgtgtgcacatatgcctcaggtgtgcttttgggactgcatggatatgtgtgtgctcaaacgtgtatcacttttcaaaaagaggttacacagactgagaaggacaagacctgtttccttgagactttcctaggtggaaaggaaagcaagtctgcagttccttgctaatctgagctacttagagtgtggtctccccaccaactccagttttgtgccctaagcctcatttctcatgttcagacctcacatcttctaagccgccctgtgtctctgaccccttctcatttgcctagtatctctgcccctgcctccctaattagctagggctggggtcagccactgccaatcctgccttactcaggaaggcaggaggaaagagactgcctctccagagcaaggcccagctgggcagagggtgaaaaagagaaatgtgagcatccgctcccccaccaccccgcccagcccctagccccactccctgcctcctgaaatggttcccacccagaactaatttattttttattaaagatggtcatgacaaatgagaaaaaaaaaa

SEQ ID NO: 2344 - DNA, 1407 bp, Homo sapiens
gaccggagaagctgtgaggttctttagcgtcacctccctcactgggcagcatgggggagaagtcagagaactgtggggttccagaggatctgttaaatggtttgaaggttacagatactcaggaagccgagtgtgctggccctccagttcctgatcccaaaaatcagcattcccagagtaagctgctcagggatgatgaggcccatctccaggaggaccagggagaagaggagtgttttcatgactgcagtgcctcatttgaggaggagccaggagcggacaaggttgagaacaaatctaatgaagatgtgaattcctctgaactagatgaagaatacctaatagaactggaaaaaaacatgtcggatgaagagaaacagaaaagaagagaagagagcactagactaaaggaggagggaaatgaacagtttaagaaaggagattatatagaagctgaaagttcttatagtcgagccctcgaaatgtgcccatcctgcttccaaaaggagaggtcgattctattttcaaatagagctgcagcaaggatgaaacaggacaagaaagaaatggccatcaatgactgcagcaaagcaattcaattaaaccccagctatatcagggcaatattgaggagagcagagttgtatgagaagacggacaagctagatgaagccctggaagactataaatctatattagaaaaagatccatcaatacatcaagcaagagaagcttgtatgagattacctaagcaaattgaagaacgtaatgaaagactaaaagaagagatgttaggtaaattaaaagatcttgggaacttggttctccgaccttttgggctctccacggaaaatttccagatcaaacaggattcctctaccggctcgtactccatcaatttcgttcaaaatccaaataataacagataacaaagataacaaaagctttacaagctgacttggaattgtgtgctgcttgctgttagctaggggaaaggccctgccaatgtttaacttttaaaagcatcttatctaaaagaaaggctatccagtagagcccagtgctcccttgtccctcttttatgatcagggtgaaatgtacttcctgatgtaatgaacctaatttgatttccattttaaggtggtgtctgtgcagctggtgtccccgattctggctgtcctatgtccaggaagaagcccatttgttgaggctgaccttcctgatcatacacacacacagcccagcaaaagcctctcctgaaccaaacaaacctgttggttgggagactgcccagacatgattgatgacgggttcccgcctgctgtcccctccctgatcacacagctaacgaggctgcctccagcatttcctgatttcctctgtggtaataaaagctttctgtgctta

SEQ ID NO: 2345 - DNA, 2942 bp, Homo sapiens
cgcaccacccccttcccgccgcgctctctcccgcccccgcgcttccggccccgcccgcccccgcgcggaggactgtgggagcggcttccttggattccgcgcttggcaacggctcggcgtcgcgctttggccaaccgctgcgtcgtccctgggcccgaataactgtcgcccgcttccctcagcgtgaggtacaaatgatgcaaaatgtgcacctggctccagagacagatgaagatgatctttattccggctataatgactacaatccaatctatgatatcgaggaattggagaatgatgcagcttttcagcaagctgtgaggactagtcatggcagaagacctccaataactgctaaaatatcaagcacggcagttactagacctatagctactggatatgggtccaagacatctctggcatcatcaataggaagaccaatgacaggggctattcaggatggagttactagacccatgacagcagtgagagcagctggttttaccaaagcagctttgagaggctctgcatttgacccccttagtcagtcaaggggccctgcttcccctttggaagccaagaaaaaagatagcccagaggaaaaaataaagcaattagagaaggaagtaaatgagttggtagaagaaagctgtattgccaatagttgtggagacttaaaattggccttagaaaaggcaaaagatgcaggaagaaaagagagagtcctggtgagacagcgagaacaagttacaactccagaaaatatcaatttggatttaacttactcagttcttttcaatttggccagtcagtattcagttaatgaaatgtatgccgaagcacttaacacttatcaagttatagtcaaaaataagatgtttagcaatgcaggaatattgaaaatgaatatgggaaatatctatttaaagcaaagaaattattccaaagccattaaattctaccgaatggcattagaccaagttccaagtgtcaataagcaaatgaggattaaaataatgcagaatattggagttacatttattcaggctggtcagtattcagatgctattaattcatatgagcacataatgagcatggcaccaaatctgaaggcaggctacaacctaactatctgttattttgctattggagaccgagaaaaaatgaagaaggcattccaaaaattgattactgttccattagaaattgatgaagataaatatatttcaccaagtgatgatcctcatactaacttagtaactgaagctataaaaaatgatcacctcaggcaaatggaacgtgaaaggaaagccatggcagaaaaatatattatgacatctgcaaaactcattgctcctgtaattgaaacatcttttgctgcaggttatgattggtgcgtggaagtggtgaaagcttctcaatatgtagagctagccaatgatctggaaataaacaaagcagttacatacttgagacaaaaagactataaccaagctgtagagatcttaaaagtgttggaaaaaaaggacagtagagtgaaaagtgcagctgcaaccaatctctcagccctgtattatatgggaaaggattttgcacaagccagcagctatgcagatatagctgtgaactctgatagatataatccagcagctcttactaataaagggaatacagtttttgcaaatggtgattatgagaaggccgctgaattctataaagaggctctaagaaatgattcttcttgtactgaagcactttataatattggccttacctatgagaaactaaatcggctagatgaggctttggactgtttcctgaaacttcacgcaatcctacgaaacagtgccgaagttctttaccagatagcaaatatatatgaattaatggaaaatcccagtcaagctattgaatggctaatgcaggtggtcagtgttattccaaccgatcctcaagttttatctaagctaggagaattatatgatcgtgaaggagataaatctcaagcatttcaatattactatgagtcatataggtattttccttgtaatattgaagtcattgagtggcttggagcctattacattgacacccaattttgggaaaaagctattcagtactttgaaagagcttctcttatacagcctacacaagtgaaatggcagctgatggtagctagttgtttcagaagaagtggtaactaccaaaaagcattagatacttacaaagatactcacagaaaatttccagaaaatgtcgaatgtctgcgtttcttagttcgtctctgcacagatcttggattaaaagatgctcaagaatatgccagaaaactgaagaggttggaaaaaatgaaagaaataagggaacagcgcataaagtcaggcagagatggcagtgggggctcccgtggcaaaagagaaggaagtgctagcggtgatagtggccagaactatagtgccagtagtaaaggtgaacgactaagtgccagactcagagctttacctgggacaaatgaaccttatgaaagtagcagtaacaaagaaatagatgcctcctatgtggacccacttggccctcaaatagaacgaccaaaaactgcagccaagaaaaggatcgatgaggatgattttgctgatgaagaattaggagatgatttgcttccagaataatattcactttaatatttattaaaggaaagaaattgccttatgagatcatcctcatgttaaaccttggattaaatatctaacctgtaattattttttttcactgtcaaaacttaagtaagtgtattctattctgtatgtatgcatttaagttgtttttttcttttaaggaataaaaacaggtaaaactaatactttaggccagtgacttccttagctttttgaaaacattgacacacaggaagaaataaatttcataacacaaaaaaaaaaaaa

SEQ ID NO: 2346 - DNA, 3171 bp, Homo sapiens
cgcaccacccccttcccgccgcgctctctcccgcccccgcgcttccggccccgcccgcccccgcgcggaggactgtgggagcggcttccttggattccgcgcttggcaacggctcggcgtcgcgctttggccaaccgctgcgtcgtccctgggcccgaataactgtcgcccgcttccctcagcgtgaggtgaagcacttcaaattgcctgatgaaagttgaatcaggaatgaagataaaagtacacaacaatgcagaaagcggtacttagcctcacaaagatggaaacattccaaaaacgtgaaaaactgcagtaggcttcttggaagtagaccaagggtgtccaatctttggcttccctgggccacatcggaagaagaattgtcttgggccacacatgaaattcacaaacactaaggtacaaatgatgcaaaatgtgcacctggctccagagacagatgaagatgatctttattccggctataatgactacaatccaatctatgatatcgaggaattggagaatgatgcagcttttcagcaagctgtgaggactagtcatggcagaagacctccaataactgctaaaatatcaagcacggcagttactagacctatagctactggatatgggtccaagacatctctggcatcatcaataggaagaccaatgacaggggctattcaggatggagttactagacccatgacagcagtgagagcagctggttttaccaaagcagctttgagaggctctgcatttgacccccttagtcagtcaaggggccctgcttcccctttggaagccaagaaaaaagatagcccagaggaaaaaataaagcaattagagaaggaagtaaatgagttggtagaagaaagctgtattgccaatagttgtggagacttaaaattggccttagaaaaggcaaaagatgcaggaagaaaagagagagtcctggtgagacagcgagaacaagttacaactccagaaaatatcaatttggatttaacttactcagttcttttcaatttggccagtcagtattcagttaatgaaatgtatgccgaagcacttaacacttatcaagttatagtcaaaaataagatgtttagcaatgcaggaatattgaaaatgaatatgggaaatatctatttaaagcaaagaaattattccaaagccattaaattctaccgaatggcattagaccaagttccaagtgtcaataagcaaatgaggattaaaataatgcagaatattggagttacatttattcaggctggtcagtattcagatgctattaattcatatgagcacataatgagcatggcaccaaatctgaaggcaggctacaacctaactatctgttattttgctattggagaccgagaaaaaatgaagaaggcattccaaaaattgattactgttccattagaaattgatgaagataaatatatttcaccaagtgatgatcctcatactaacttagtaactgaagctataaaaaatgatcacctcaggcaaatggaacgtgaaaggaaagccatggcagaaaaatatattatgacatctgcaaaactcattgctcctgtaattgaaacatcttttgctgcaggttatgattggtgcgtggaagtggtgaaagcttctcaatatgtagagctagccaatgatctggaaataaacaaagcagttacatacttgagacaaaaagactataaccaagctgtagagatcttaaaagtgttggaaaaaaaggacagtagagtgaaaagtgcagctgcaaccaatctctcagccctgtattatatgggaaaggattttgcacaagccagcagctatgcagatatagctgtgaactctgatagatataatccagcagctcttactaataaagggaatacagtttttgcaaatggtgattatgagaaggccgctgaattctataaagaggctctaagaaatgattcttcttgtactgaagcactttataatattggccttacctatgagaaactaaatcggctagatgaggctttggactgtttcctgaaacttcacgcaatcctacgaaacagtgccgaagttctttaccagatagcaaatatatatgaattaatggaaaatcccagtcaagctattgaatggctaatgcaggtggtcagtgttattccaaccgatcctcaagttttatctaagctaggagaattatatgatcgtgaaggagataaatctcaagcatttcaatattactatgagtcatataggtattttccttgtaatattgaagtcattgagtggcttggagcctattacattgacacccaattttgggaaaaagctattcagtactttgaaagagcttctcttatacagcctacacaagtgaaatggcagctgatggtagctagttgtttcagaagaagtggtaactaccaaaaagcattagatacttacaaagatactcacagaaaatttccagaaaatgtcgaatgtctgcgtttcttagttcgtctctgcacagatcttggattaaaagatgctcaagaatatgccagaaaactgaagaggttggaaaaaatgaaagaaataagggaacagcgcataaagtcaggcagagatggcagtgggggctcccgtggcaaaagagaaggaagtgctagcggtgatagtggccagaactatagtgccagtagtaaaggtgaacgactaagtgccagactcagagctttacctgggacaaatgaaccttatgaaagtagcagtaacaaagaaatagatgcctcctatgtggacccacttggccctcaaatagaacgaccaaaaactgcagccaagaaaaggatcgatgaggatgattttgctgatgaagaattaggagatgatttgcttccagaataatattcactttaatatttattaaaggaaagaaattgccttatgagatcatcctcatgttaaaccttggattaaatatctaacctgtaattattttttttcactgtcaaaacttaagtaagtgtattctattctgtatgtatgcatttaagttgtttttttcttttaaggaataaaaacaggtaaaactaatactttaggccagtgacttccttagctttttgaaaacattgacacacaggaagaaataaatttcataacacaaaaaaaaaaaaa

SEQ ID NO: 2347 - DNA, 785 bp, Homo sapiens
ccggaagtggttctccgcccctgccactgggccatggagactgtggcacagtagactgtagtgtgaggctcgcgggggcagtggccatggaggccgtgctgaacgagctggtgtctgtggaggacctgctgaagtttgaaaagaaatttcagtctgagaaggcagcaggctcggtgtccaagagcacgcagtttgagtacgcctggtgcctggtgcggagcaagtacaatgatgacatccgtaaaggcatcgtgctgctcgaggagctgctgcccaaagggagcaaggaggaacagcgggattacgtcttctacctggccgtggggaactaccggctcaaggaatacgagaaggccttaaagtacgtccgcgggttgctgcagacagagccccagaacaaccaggccaaggaactggagcggctcattgacaaggccatgaagaaagatggactcgtgggcatggccatcgtgggaggcatggccctgggtgtggcgggactggccggactcatcggacttgctgtgtccaagtccaaatcctgaaggagacgcgggagcccacggagaacgctccaggagggcctgtccatcctcgctgtcctttccctgttctccccctgccccccgtctctatcctctgtggccttcagctaatttctgctcccctgagattcgtccttcagccccatcatgtgctttgggatgagtgtaaataaaacggggctgtggcttgggaaaaaaaaaaaaaaaaaaaaaaaaaaaaaaaaaaaaaaaaaaaaaaaa

SEQ ID NO: 2348 - DNA, 3468 bp, Homo sapiens
ttcagcttgtgggtagcactcgggccgagccatgcaggcggcgcgcgtggactacatcgctccctggtgggtcgtgtggctgcacagcgtcccgcacgtcggcctgcgcctgcagcccgtgaacagcaccttcagccccggcgacgagagttaccaggagtcgctgctgttcctggggctggtggccgccgtctgcctgggcctgaacctcatcttccttgtggcttacctggtctgtgcatgccactgccggcgggacgatgcggtgcagaccaagcagcaccactcctgctgcatcacctggacggccgtggtggccgggctcatctgctgtgctgcggtgggcgttggtttctatggaaacagcgagaccaacgatggggcgtaccagctgatgtactccttggacgatgccaaccacaccttctctgggatcgatgctctggtttccggaactacccagaagatgaaggtggacctagagcagcacctggcccggctcagtgagatctttgctgcccggggcgattacctgcagaccctgaagttcatacagcagatggcgggcagcgttgttgttcagctctcaggactgcccgtgtggagggaggtcaccatggagctgaccaagctatccgaccagactggctacgtggagtactacaggtggctctcctacctcctgctctttatcctggacctggtcatctgcctcattgcctgcctgggactggccaagcgctccaagtgtctcctggcctcgatgctgtgctgtggggcactgagcctgctcctcagttgggcatccctggccgctgatggctctgcggcagtggccaccagtgacttctgtgtggctcctgacaccttcatcctgaacgtcacggagggccagatcagcacagaggtgactcgctactacctgtattgcagccagagtggaagcagccccttccagcagaccctgaccaccttccagcgcgcacttaccaccatgcagatccaggtcgcggggctgctgcagtttgccgtgcccctcttctccactgcagaggaagacctgcttgcaatccagctcctgctgaactcctcagagtccagccttcaccagctgaccgccatggtggactgccgagggctgcacaaggattatctggacgctcttgctggcatctgctacgacggcctccagggcttgctgtaccttggcctcttctccttcctggccgccctcgccttctccaccatgatctgtgcagggccaagggcctggaagcacttcaccaccagaaacagagactacgatgacattgatgatgatgacccctttaacccccaagcctggcgcatggcggctcacagtcccccgaggggacagcttcacagcttctgcagctacagcagtggcctgggaagtcagaccagcctgcagcccccggcccagaccatctccaacgcccctgtctccgagtacatgaaccaagccatgctctttggtaggaacccacgctacgagaacgtgccactaatcgggagagcctcccctccgcctacgtactctcccagcatgagagccacctacctgtctgtggcggatgagcacctgaggcactacgggaatcagtttccagcctaacagactttcgggggttcctgcctcctttttccgttctggtttttaattagtgcaaatacaagctgcgtttctttaatagaaaccaaaggcatctggagcccgagaggcctcctgctgtggcagaggagcagctgggattcccgaccaaagccccagggggtgcagaagactcaccacgcgggccagcctctctcttttgccctgctctccacaccagaaatgcccccaggtgcttggctgcctcagaggtaccatccctgagctggctgcctggccctgctcacccctacgcctcgcccttgccaggaggggagtggcagtgaggagggggccaggtcaggcaccaccatcaagagagctgtgtgttctctctggtcccacaacgatgactctgcctcttgtcagcccagccaagagcccagacgacccctctgtcctcgttccctgtcctcgttccctgcaggtaacatgagaagggctgatcaggagatgctctttaagaagttcgcacccctgctgacaccagaacagcccaaatcagagttcccagggccagacaggctcttcctgggccacagaggggaggcatcaggaaagctctgcagtggggggctggtggctccggggctgggggatcacaggctggtgaaccccggtgggaacagaggtgaaagcctgccacattccgcctgtctccctaaccctccattgcctcgcctctattccagaatcaatgctgcagaatgtgttagctgcagataggcatggtctcaggtatgaacagacactttgaaacgactttaggtctttcttttctccagtgttttaaacatgttgattatccaaagaattgaaactcctagcacatccagtttttacaacagatttgcagctcattccttaccctggttaggtcactacttttgcagattttgctggcactgatctggagatctgcagatctggaggagacgggaaggagtcgattcttaaataaggatcagtgaggcatcctgtcccaagctactgtttggtggggatctgggttcatctcacccacagagggaggatctttaagaggagaaaaaagccaagagggaaagccagagttccctgttctaggggactagccaaatgcctacatcagctgtcccctccctgttgtctccaagtaagtttgccagaaaaggttttagcaaagtgctacaactgtgtctttataggaggataggcctctgccctgccccacccccaccacctgtccccacccagtgtcccaggccacaggagcttattggccaggagggaataatgtcccccaatactgcctgttgagggaccagagttggggtctttggtgcttccaacctcctgccaacctggagttcacaacaccagagccccacggcctcgcacactgaagcaggggcgtgcggtgactcggtgcttctgttttggaagaaccacctgtcatcaaaacatggacagcagggtgttctcagctcccagcgaagcctccacaacagaatggggccacagggcagccgggactccctgtctcacctacattaacccatgcatactgtatgccataaactcactttggtatatccgcgtcacatgcagagaggaactctgcgacgtcaaagtgttgcttcttaaagtttcattattggcaactagagggttgtttttaatgcatggaaactaaacagattcctcggggagttcctgaaggaaccaggtgggcaaacctttgcttatatacatgcggcctcacctggaagagaaataaaccacttgtactaaaaaaaaaaaaaaaaaaaaaaaaa

SEQ ID NO: 2349 - DNA, 6172 bp, Homo sapiens
tggcgtgcagcgcgggcctcggcggggcccagcgccccggcccgggaggatgcggcccggggcggcccgggagctgagcagggcccccgcgccggcccctccgggccccggcctccagagccgcagccaccgccccgcccccgagagacatgacttccaagccgcattccgactggattccctacagtgtcttagatgatgagggcagaaacctgaggcagcagaagcttgatcggcagcgggccctgctggagcagaagcagaagaagaagcgccaggagcccctgatggtgcaggccaatgcagatgggcggccccggagccggcgggcccggcagtcagaggaacaagcccccctggtggagtcctacctcagcagcagtggcagcaccagctaccaagttcaagaggccgactcactcgccagtgtgcagctgggagccacgcgcccaacagcaccagcttcagccaagagaaccaaggcggcagctacagcagggggccagggtggcgccgctaggaaggagaagaagggaaagcacaaaggcaccagcgggccagcagcactggcagaagacaagtctgaggcccaaggcccagtgcagattctgactgtgggccagtcagaccacgcccaggacgcaggggagacggcagctggtgggggcgaacggcccagcgggcaggatctccgtgccacgatgcagaggaagggcatctccagcagcatgagctttgacgaggatgaggaggatgaggaggagaatagctccagctcctcccagctaaatagtaacacccgccccagctctgctactagcaggaagtccgtcagggaggcagcctcagcccctagcccaacagctccagagcaaccagtggacgttgaggtccaggatcttgaggagtttgcactgaggccggccccccagggtatcaccatcaaatgccgcatcactcgggacaagaaagggatggaccggggcatgtaccccacctactttctgcacctggaccgtgaggatgggaagaaggtgttcctcctggcgggaaggaagagaaagaagagtaaaacttccaattacctcatctctgtggacccaacagacttgtctcgaggaggggacagctatatcgggaaactgcggtccaacttgatgggcaccaagttcactgtttatgacaatggagtcaaccctcagaaggcctcatcctccactttggaaagtggaaccttacgtcaggagctggcagctgtgtgctacgagacaaacgtcttaggcttcaaggggcctcggaagatgagcgtgattgtcccaggcatgaacatggttcatgagagagtctctatccgcccccgcaacgagcatgagacactgctagcacgctggcagaataagaacacggagagtatcatcgagctgcaaaacaagacacctgtctggaatgatgacacacagtcctatgtactcaacttccatgggcgcgtcacacaggcctccgtgaagaacttccagatcatccatggcaatgacccggactacatcgtgatgcagtttggccgggtagcagaggatgtgttcaccatggattacaactacccgctgtgtgcactgcaggcctttgccattgccctgtccagcttcgacagcaagctggcgtgcgagtagaggcctcttcgtgccctttggggttgcccagcctggagcggagcttgcctgcctgcctgtggagacagccctgcctatcctctgtatataggccttccgccagatgaagctttggccctcagtgggctccctggcccagccagccaggaactggctcctttgcctctgctactgaggcaggggagtagtggagagcgggtgggtgggtgtgaagggatgagaataattctttccatgccacgagatcaacacacactcccacccttggggtagtagtgtgttgtagtcgtacttaccaagctgagcaacctcttcagctgggaaggccgcaagaggcatagagggagaggaagcacactgcagggctgctgtggcccagtcgtccgctcagccaaggagtcagatggcaatgggtactccagcaggtaggggcacagtgaatgtgtgtatgtatgaaggccacatcaactttatgtagcaaagggcttggtggccaagcctggcccttaaacaactgcagaaagcccttcaacttcagaaggcctcactcaagcctgagagaagttgggagggtggtggggacaggtaagtggcaggaccctgtcaggattgcaggtgcctggcttgctgtggctatgggaatcagctggtggctaggtttctagcgcatttgatttctccaggtttgctgtgtctcacagaggcagtaggaacccagctctcagggctgtcttggtggatgggccctgcaagacacaggctcagcatgcagaagtgcatgaacagggtccctggatcagggttgttctgggagtcctgtcagcttccccaggagctctctgctgagcagcccagcacaacccccaggaaacacaaatggggtccaggtcaccagcctgactgcacacagctaggcatgcctgggaatcctgctgccagagaaccattcccaagccatggcatgctccttgaagaatctctcctctctctctctctctggaaagacccaactttctcactgctgtcagccaagtcatggttggtaaccatgtaggttcttgggagggaatgggacagggtgaataaagcagggaatattttagaaccacaagagatcagcagtggcaggacccttaggaatctagtacaaccttgttgctttaggtgagtcacactcagaaaatggggcttgccctgggtcacctagctggttaatggcagcattcagaacttcaagttctcttgatttctttgttcccactgtcccccaagaaactagtatctctggcctcctggggcccattctgcatgccctccccacttcccccgattcagagacttagaagcatcagagttgataaattagattgaaaccattccagtaggaaatcaggcagttccctgttgaaagttgtctggctttttgcacgtgagtatgatccaggattggcctgtgtctggcccctccgcgagggctactcagcagtaagcaggccttagtacggctgctgcacacttctcggtctaggtgggagagagtgcataaaggttctggggctgggcctgagcctaactccctccactaccgctatttctccttggatggcaccatccaccctgcaggcttgggaactgtaagctcaagcttttgctcatttgtcatttaccctggtggaggcttcttgcccagatagagatctgaaattggtgggaagcaagcaggggtcgtaccttgctttagagtagatgtttggaaaagctaagtagaaattttttaaaatagaagttgtattttaaacgtgttaggctttataggtgaaggacttgttttgacttaagtagaagtaatatgctctcatttctttgtaatctagattttcctatgttgaatgcttaaagcaaggcatacctgtcctagcaggatctgcccacacctcggccgtacatctctgtgagagaccccctccaacgattagcttttgcaacatggtccagtttctagagggcactagaactttgtgccagcgctggcgagataccatggtgccatcctcctttctatagttccagtttagcccttccctgcctttaaggagaagagatcttcatggtgacatttgagatgatggaaactagatcgtctctaatgttaggtcaagctatttctctggatctatgattttaagatagaacaggctggttctgagttctggtgagacggagaccccggtggcagtggaaaaatcagaagcacaaaggaaaactcttggcctctgctttctcctgtagcacaaagagggagttggctggatcttttggtggagtcaggaaagacaggctgagctttctagcctaagtgtggagaaggatagcctcagccacaaaactctgtcaggcattgaatgacaagcatcagtagctgagtgcactcctggtgatcctggttttccttgaccactggccctggggccatgggtgcatggactcgtaaagctgctagggcccctagaaaccacctgggttcagcctctcccacaataagagttcttgcccttcataccctctacctggatggatggtctttgggcagggaattaatgacagaatgagcagtccctaatggtattgggcagttgggagtgagtttaggcagcttctctgtaaccgcttctggggccacaccccaaaactctacaccctctgccccagaacaattctgcagagtggtgaagttcacttccccaactcttctccaagtctagctttcctttccttctggctccaaggtgctctgtgtccgtctgtgtatgtgtgtgtctgtgcgtctgtgtgtttatttggggaaaagggcaatcagcaatcaactgaggtttcttaattgtgattatattcctgagaatgaatgagtaggaaaggaataaggatgttgttatgatcgcctgtggattttgtccattcatctcatgctctctgaacagaaggtatacctgggaagataccagctttttctctcagggttctgagtcagaggacaccatccaagaatgttgttagcttttcagttcccgctctgcattgcctgaaaaaactggtatgttgcacgtatgcttttggttgaaattgaacatactctagtgaatgtgccttaaaaatcaagacactagttcagaggaagcacataatgtccagatctatggcgaacacaggtgttggaagccaggactgtgataatcagaagctataagagaactttcggagcctgcctccttcagtgacaagtagggcacaaaattctagaagcagaaggtttttttttttttttttttctccattctgaaaatagcaggacatttacctcttaaataaacttagcatttagaggtaattctaaatttaacaagtgacagggttggtttcaaagaaaaaggtccatgctttgcttacaatggagtctgcagtgaggggagatgctgggatagccatttccatggctctgttatgcaagcacaaatttcatctcctagatggacttcctggttttctcttactgcagtaacactggccttcccttctctaattccttaccccagctgcggcatccctgtgttaactcaggatgccaagtggccctcagattacacttctccagatagctgaatgagtctgctttcactgtgactgggacctgaatgacctgcagtcagggcccagagttgggactctatactaccctgggctctggtctgtaggtttgtagtagccaccggtaataagccaagggctaggctcttgtttgagtttatggccacctggaattttcagtcatctcatgatacaggcgggaggggcagaacagatagattacgacaggtttggtttttaaattttccaaccaagtggaaaggcaagttggtcttatagaaagcactactgcacttagtagctatgtgattttgagcaaaccacataatctctctaggtccattttcctaaccacaagataaagatgttacattgtcaaagcttgccgtaggatttggggtgaatgaaaattattccttgctttcatcactacctttatagctctcatcactacctttatagctcatcactgtgcctttttttctttcctaagaaagacatcacatccctctcctctcctcctctgtgctcctgtccctccctccccctagcaaggtccaggcaaagctggagatgaggctgagatccagagtttcctagaacgcaacttaggatggctaggaaagggaagcctgactgctcggtcaggagggtgcagtatctcttgctgggaacacagccagtttccacaatgcctagactgtgtatgtctatttgcacaagattgtcttttcctattttggagtggtcagacattttatttttgttcaagattatctggcgttttagacaaatttgcaaaactgtgcttttattgactttttgaataaactttggtattctgaaaaaaaaaaaaaaaa

SEQ ID NO: 2350 - DNA, 6429 bp, Homo sapiens
cttgaggattcagtctggtcctgaagggtttggggggagactgcgaccagaagatgtttccatgtcctaattaatgggtgatggtggttgttagtctgactgttgccacggtgatgaagggagacatccaagtgctggtttcagtactgaggcgaatacagggaatttcaacaggctccaggtcttactatgcagcctgaagtgggaccatcccttaaacccactccatcctgtggccacgatgggggccaggacacctttgccttctttctgggtttctttctttgccgagacagggattttgttcccaggaggcactccctggcccatgggatctcagcattcaaagcagcacaggaaacctgggcccctgaaacggggccaccgaagagatcggagaacaaccaggaggaagtactggaaggaaggaagggagatcgctcgtgtcttagatgatgagggcagaaacctgaggcagcagaagcttgatcggcagcgggccctgctggagcagaagcagaagaagaagcgccaggagcccctgatggtgcaggccaatgcagatgggcggccccggagccggcgggcccggcagtcagaggaacaagcccccctggtggagtcctacctcagcagcagtggcagcaccagctaccaagttcaagaggccgactcactcgccagtgtgcagctgggagccacgcgcccaacagcaccagcttcagccaagagaaccaaggcggcagctacagcagggggccagggtggcgccgctaggaaggagaagaagggaaagcacaaaggcaccagcgggccagcagcactggcagaagacaagtctgaggcccaaggcccagtgcagattctgactgtgggccagtcagaccacgcccaggacgcaggggagacggcagctggtgggggcgaacggcccagcgggcaggatctccgtgccacgatgcagaggaagggcatctccagcagcatgagctttgacgaggatgaggaggatgaggaggagaatagctccagctcctcccagctaaatagtaacacccgccccagctctgctactagcaggaagtccgtcagggaggcagcctcagcccctagcccaacagctccagagcaaccagtggacgttgaggtccaggatcttgaggagtttgcactgaggccggccccccagggtatcaccatcaaatgccgcatcactcgggacaagaaagggatggaccggggcatgtaccccacctactttctgcacctggaccgtgaggatgggaagaaggtgttcctcctggcgggaaggaagagaaagaagagtaaaacttccaattacctcatctctgtggacccaacagacttgtctcgaggaggggacagctatatcgggaaactgcggtccaacttgatgggcaccaagttcactgtttatgacaatggagtcaaccctcagaaggcctcatcctccactttggaaagtggaaccttacgtcaggagctggcagctgtgtgctacgagacaaacgtcttaggcttcaaggggcctcggaagatgagcgtgattgtcccaggcatgaacatggttcatgagagagtctctatccgcccccgcaacgagcatgagacactgctagcacgctggcagaataagaacacggagagtatcatcgagctgcaaaacaagacacctgtctggaatgatgacacacagtcctatgtactcaacttccatgggcgcgtcacacaggcctccgtgaagaacttccagatcatccatggcaatgacccggactacatcgtgatgcagtttggccgggtagcagaggatgtgttcaccatggattacaactacccgctgtgtgcactgcaggcctttgccattgccctgtccagcttcgacagcaagctggcgtgcgagtagaggcctcttcgtgccctttggggttgcccagcctggagcggagcttgcctgcctgcctgtggagacagccctgcctatcctctgtatataggccttccgccagatgaagctttggccctcagtgggctccctggcccagccagccaggaactggctcctttgcctctgctactgaggcaggggagtagtggagagcgggtgggtgggtgtgaagggatgagaataattctttccatgccacgagatcaacacacactcccacccttggggtagtagtgtgttgtagtcgtacttaccaagctgagcaacctcttcagctgggaaggccgcaagaggcatagagggagaggaagcacactgcagggctgctgtggcccagtcgtccgctcagccaaggagtcagatggcaatgggtactccagcaggtaggggcacagtgaatgtgtgtatgtatgaaggccacatcaactttatgtagcaaagggcttggtggccaagcctggcccttaaacaactgcagaaagcccttcaacttcagaaggcctcactcaagcctgagagaagttgggagggtggtggggacaggtaagtggcaggaccctgtcaggattgcaggtgcctggcttgctgtggctatgggaatcagctggtggctaggtttctagcgcatttgatttctccaggtttgctgtgtctcacagaggcagtaggaacccagctctcagggctgtcttggtggatgggccctgcaagacacaggctcagcatgcagaagtgcatgaacagggtccctggatcagggttgttctgggagtcctgtcagcttccccaggagctctctgctgagcagcccagcacaacccccaggaaacacaaatggggtccaggtcaccagcctgactgcacacagctaggcatgcctgggaatcctgctgccagagaaccattcccaagccatggcatgctccttgaagaatctctcctctctctctctctctggaaagacccaactttctcactgctgtcagccaagtcatggttggtaaccatgtaggttcttgggagggaatgggacagggtgaataaagcagggaatattttagaaccacaagagatcagcagtggcaggacccttaggaatctagtacaaccttgttgctttaggtgagtcacactcagaaaatggggcttgccctgggtcacctagctggttaatggcagcattcagaacttcaagttctcttgatttctttgttcccactgtcccccaagaaactagtatctctggcctcctggggcccattctgcatgccctccccacttcccccgattcagagacttagaagcatcagagttgataaattagattgaaaccattccagtaggaaatcaggcagttccctgttgaaagttgtctggctttttgcacgtgagtatgatccaggattggcctgtgtctggcccctccgcgagggctactcagcagtaagcaggccttagtacggctgctgcacacttctcggtctaggtgggagagagtgcataaaggttctggggctgggcctgagcctaactccctccactaccgctatttctccttggatggcaccatccaccctgcaggcttgggaactgtaagctcaagcttttgctcatttgtcatttaccctggtggaggcttcttgcccagatagagatctgaaattggtgggaagcaagcaggggtcgtaccttgctttagagtagatgtttggaaaagctaagtagaaattttttaaaatagaagttgtattttaaacgtgttaggctttataggtgaaggacttgttttgacttaagtagaagtaatatgctctcatttctttgtaatctagattttcctatgttgaatgcttaaagcaaggcatacctgtcctagcaggatctgcccacacctcggccgtacatctctgtgagagaccccctccaacgattagcttttgcaacatggtccagtttctagagggcactagaactttgtgccagcgctggcgagataccatggtgccatcctcctttctatagttccagtttagcccttccctgcctttaaggagaagagatcttcatggtgacatttgagatgatggaaactagatcgtctctaatgttaggtcaagctatttctctggatctatgattttaagatagaacaggctggttctgagttctggtgagacggagaccccggtggcagtggaaaaatcagaagcacaaaggaaaactcttggcctctgctttctcctgtagcacaaagagggagttggctggatcttttggtggagtcaggaaagacaggctgagctttctagcctaagtgtggagaaggatagcctcagccacaaaactctgtcaggcattgaatgacaagcatcagtagctgagtgcactcctggtgatcctggttttccttgaccactggccctggggccatgggtgcatggactcgtaaagctgctagggcccctagaaaccacctgggttcagcctctcccacaataagagttcttgcccttcataccctctacctggatggatggtctttgggcagggaattaatgacagaatgagcagtccctaatggtattgggcagttgggagtgagtttaggcagcttctctgtaaccgcttctggggccacaccccaaaactctacaccctctgccccagaacaattctgcagagtggtgaagttcacttccccaactcttctccaagtctagctttcctttccttctggctccaaggtgctctgtgtccgtctgtgtatgtgtgtgtctgtgcgtctgtgtgtttatttggggaaaagggcaatcagcaatcaactgaggtttcttaattgtgattatattcctgagaatgaatgagtaggaaaggaataaggatgttgttatgatcgcctgtggattttgtccattcatctcatgctctctgaacagaaggtatacctgggaagataccagctttttctctcagggttctgagtcagaggacaccatccaagaatgttgttagcttttcagttcccgctctgcattgcctgaaaaaactggtatgttgcacgtatgcttttggttgaaattgaacatactctagtgaatgtgccttaaaaatcaagacactagttcagaggaagcacataatgtccagatctatggcgaacacaggtgttggaagccaggactgtgataatcagaagctataagagaactttcggagcctgcctccttcagtgacaagtagggcacaaaattctagaagcagaaggtttttttttttttttttttctccattctgaaaatagcaggacatttacctcttaaataaacttagcatttagaggtaattctaaatttaacaagtgacagggttggtttcaaagaaaaaggtccatgctttgcttacaatggagtctgcagtgaggggagatgctgggatagccatttccatggctctgttatgcaagcacaaatttcatctcctagatggacttcctggttttctcttactgcagtaacactggccttcccttctctaattccttaccccagctgcggcatccctgtgttaactcaggatgccaagtggccctcagattacacttctccagatagctgaatgagtctgctttcactgtgactgggacctgaatgacctgcagtcagggcccagagttgggactctatactaccctgggctctggtctgtaggtttgtagtagccaccggtaataagccaagggctaggctcttgtttgagtttatggccacctggaattttcagtcatctcatgatacaggcgggaggggcagaacagatagattacgacaggtttggtttttaaattttccaaccaagtggaaaggcaagttggtcttatagaaagcactactgcacttagtagctatgtgattttgagcaaaccacataatctctctaggtccattttcctaaccacaagataaagatgttacattgtcaaagcttgccgtaggatttggggtgaatgaaaattattccttgctttcatcactacctttatagctctcatcactacctttatagctcatcactgtgcctttttttctttcctaagaaagacatcacatccctctcctctcctcctctgtgctcctgtccctccctccccctagcaaggtccaggcaaagctggagatgaggctgagatccagagtttcctagaacgcaacttaggatggctaggaaagggaagcctgactgctcggtcaggagggtgcagtatctcttgctgggaacacagccagtttccacaatgcctagactgtgtatgtctatttgcacaagattgtcttttcctattttggagtggtcagacattttatttttgttcaagattatctggcgttttagacaaatttgcaaaactgtgcttttattgactttttgaataaactttggtattctgaaaaaaaaaaaaaaaa

SEQ ID NO: 2351 - DNA, 1677 bp, Homo sapiens
aggttctcttacatcgaccgcctaagagtcgcgctgtaagaagcaacaacctctcctcttcgtctccgccatcagctcggcagtcgcgaagcagcaaccatgcgtgagtgcatctccatccacgttggccaggctggtgtccagattggcaatgcctgctgggagctctactgcctggaacacggcatccagcccgatggccagatgccaagtgacaagaccattgggggaggagatgattccttcaacaccttcttcagtgagacgggggctggcaagcatgtgccccgggcagtgtttgtagacttggaacccacagtcattgatgaagttcgcactggcacctaccgccagctcttccaccctgagcaacttatcacaggcaaagaagatgctgccaataactatgcccgagggcactacaccattggcaaggagatcattgacctcgtgttggaccgaattcgcaagctggccgaccagtgcacgggtctccagggcttcttggttttccacagctttggtgggggaactggttctgggttcacctcgctgctcatggaacgtctctcagttgattatggcaagaagtccaagctggagttctctatttacccggcgccccaggtttccacagctgtagttgagccctacaactccatcctcaccacccacaccaccctggagcactctgattgtgccttcatggtagacaatgaggccatctatgacatctgtcgtagaaacctcgatattgagcgtccaacctatactaacctgaataggttaataggtcaaattgtgtcctccatcactgcttccctgagatttgatggagccctgaatgttgacctgacagaattccagaccaacctggtgccctatccccgcatccacttccctctggccacatatgcccctgtcatctctgctgagaaagcctaccatgaacagctttctgtagcagagatcaccaatgcttgctttgagccagccaaccagatggtgaaatgtgaccctcgccatggtaaatacatggcttgctgcctgttgtaccgtggtgacgtggttcccaaagatgtcaatgctgccattgccaccatcaagaccaagcgtaccatccagtttgtggattggtgccccactggcttcaaggttggcatcaactaccagcctcccactgtggtgcctggtggagacctggccaaggtacagagagctgtgtgcatgctgagcaacaccacagccattgctgaggcctgggctcgcctggaccacaagtttgacctgatgtatgccaaacgtgcctttgttcactggtacgttggggaggggatggaggaaggtgagttttcagaggcccgtgaggacatggctgcccttgagaaggattatgaggaggttggtgtggattctgttgaaggagagggtgaggaagaaggagaggaatactaaagttaaaacgtcacaaaggtgctgcttttacagggaagcttattctgttttaaacattgaaaagttgtggtctgatcagttaatttgtatgtagcagtgtatgctctcatatacaattactgacctatgctctaaaacatgaatgctttgttacagacccaagctgtccatttctgtgatgggttttgaataaagtattccctgtcttaaaaaaaaaaaaaa

SEQ ID NO: 2352 - DNA, 1380 bp, Homo sapiens
gtctctgcccatccgcgcacccgggcttcggctggagagggccagctcgcttcaggaggccgaaccccgttcccaccaaccctctcagctcagacgcggggtgctgagtcacggggggggggtggttctgtggatagttggaatgcatacacagaggaaagggggatgcggcaccagcagacagagagacaagaccccagccagcccctgtccaggcagcatggcacataccgccagatcttccatccagagcagctcatcacaggcaaggaagatgctgccaataactatgcctggggccactacaccattgggaaggagttcatcgacctgctactggaccggattcggaagctggctgaccagtgcacaggacttcagggcttcctggtgttccacagccttggtcggggcactggctctgacgtcacctcattcctgatggagtggctttctgttaactatggcaagaaatccaagctgggattctccatctacccagccccccaggtgtctacagccatggtccagccctacaactctatcctgaccacccacaccaccctggagcactcagactgtgccttcatggtggacaacaaagcaatctatgacatctgccaccgcaacctagacattgagcgcccaacctacaccaacctcaatcgcctcattagccaaattgtctcctccatcacagcttctctgcgctttgacggggccctcaatgtggacctgacagagttccagaccaacctggtgtcctacctcacatccacttccccctggccacctatgcaccagtcatctctgcagaaaaagtataccacgagcagctgtcggtggcagagattaccaatgcctgctttgagcctgccaaccagatggtgaagtgtgatccccggcacggcaagtacatggcctgctgcctgctataccatggagatgtggtgcccaaggatgtcaacgctgccattgctgccatcaagaccaagtgcagcattcagtttgtggactggtgccccacaggctttaaggttgatatcaatcaccagcctcccactgtggtgcctgggagtgacctggtaaagtgcaacgtgccatgtgcatgctgagcaacatgacagccatcactatggcctgggcccgcctggaccacaagtttgacctgatgtatgccaagagggcgtttgggcactgatatgtgggtgagggcatggaggagggtgagttctccaaggcccatgaggatatgactgccctggagaaggattacaaggaggtgggcatggatagtgtggagtgtggggaagaaaagataggggggatgaatactaggggaatactgtgtgtctgtcctacataaagtgctgtggcctt

SEQ ID NO: 2353 - DNA, 1581 bp, Homo sapiens
actacttctcccccggactccttggtagtctgttagtgggagatccttgttgccgtcccttcgcctccttcaccgccgcagaccccttcaagttctagtcatgcgtgagtgcatctccatccacgttggccaggctggtgtccagattggcaatgcctgctgggagctctactgcctggaacacggcatccagcccgatggccagatgccaagtgacaagaccattgggggaggagatgattccttcaacaccttcttcagtgaaacgggtgctggcaagcatgtgccccgggcagtgtttgtagacttggaacccacagtcattgatgaagttcgcactggcacttaccgccagctcttccaccctgagcaactcatcacaggcaaggaagatgctgccaataactatgcccgagggcactacaccattggcaaggagatcattgacctcgtgttggaccgaattcgcaagctggctgaccagtgcaccggtcttcagggcttcttggttttccacagctttggtgggggaactggttctgggttcacctcgctgctcatggaacgtctctcagttgattatggcaagaagtccaagctggagttctccatttacccggcgccccaggtttccacagctgtagttgagccctacaactccatcctcaccacccacaccaccctggagcactctgattgtgccttcatggtagacaatgaggccatctatgacatctgtcgtagaaacctcgatatcgagcgcccaacctacactaaccttaaccgccttattagccagattgtgtcctccatcactgcttccctgagatttgatggagccctgaatgttgacctgacagaattccagaccaacctggtgccctacccccgcatccacttccctctggccacatatgcccctgtcatctctgctgagaaagcctaccatgaacagcttactgtagcagagatcaccaatgcttgctttgagccagccaaccagatggtgaaatgtgaccctcgccatggtaaatacatggcttgctgcctgttataccgtggtgacgtggttcccaaagatgtcaatgctgccattgccaccatcaaaaccaagcgtaccatccagtttgtggattggtgccccactggcttcaaggttggcattaattaccagcctcccactgtggtgcctggcggagacctggccaaggtacagagagctgtgtgcatgctgagcaataccacagctgttgccgaggcctgggctcgcctggaccacaagtttgacctgatgtatgccaagcgtgcctttgttcactggtacgtgggtgaggggatggaggaaggcgagttttcagaggcccgtgaggacatggctgcccttgagaaggattatgaggaggttggagcagatagtgctgacggagaggatgagggtgaagagtattaacctgtgtgctgtacttttacactcctttgtcttggaactgtcttatttttgttctgtaaatgtctattgccgtaaattgttaataaaattgatgtttccatttcaaaaaaaaaaaaaaaaaaaaaaaaaaa

SEQ ID NO: 2354 - DNA, 2510 bp, Homo sapiens
gcacctcgctgctccagcctctggggcgcattccaaccttccagcctgcgacctgcggagaaaaaaaattacttattttcttgccccatacataccttgaggcgagcaaaaaaattaaattttaaccatgagggaaatcgtgcacatccaggctggtcagtgtggcaaccagatcggtgccaagttctgggaggtgatcagtgatgaacatggcatcgaccccaccggcacctaccacggggacagcgacctgcagctggaccgcatctctgtgtactacaatgaagccacaggtggcaaatatgttcctcgtgccatcctggtggatctagaacctgggaccatggactctgttcgctcaggtccttttggccagatctttagaccagacaactttgtatttggtcagtctggggcaggtaacaactgggccaaaggccactacacagagggcgccgagctggttgattctgtcctggatgtggtacggaaggaggcagagagctgtgactgcctgcagggcttccagctgacccactcactgggcgggggcacaggctctggaatgggcactctccttatcagcaagatccgagaagaataccctgatcgcatcatgaataccttcagtgtggtgccttcacccaaagtgtctgacaccgtggtcgagccctacaatgccaccctctccgtccatcagttggtagagaatactgatgagacctattgcattgacaacgaggccctctatgatatctgcttccgcactctgaagctgaccacaccaacctacggggatctgaaccaccttgtctcagccaccatgagtggtgtcaccacctgcctccgtttccctggccagctcaatgctgacctccgcaagttggcagtcaacatggtccccttcccacgtctccatttctttatgcctggctttgcccctctcaccagccgtggaagccagcagtatcgagctctcacagtgccggaactcacccagcaggtcttcgatgccaagaacatgatggctgcctgtgacccccgccacggccgatacctcaccgtggctgctgtcttccgtggtcggatgtccatgaaggaggtcgatgagcagatgcttaacgtgcagaacaagaacagcagctactttgtggaatggatccccaacaatgtcaagacagccgtctgtgacatcccacctcgtggcctcaagatggcagtcaccttcattggcaatagcacagccatccaggagctcttcaagcgcatctcggagcagttcactgccatgttccgccggaaggccttcctccactggtacacaggcgagggcatggacgagatggagttcaccgaggctgagagcaacatgaacgacctcgtctctgagtatcagcagtaccaggatgccaccgcagaagaggaggaggatttcggtgaggaggccgaagaggaggcctaaggcagagcccccatcacctcaggcttctcagttcccttagccgtcttactcaactgcccctttcctctccctcagaatttgtgtttgctgcctctatcttgttttttgttttttcttctggggggggtctagaacagtgcctggcacatagtaggcgctcaataaatacttgtttgttgaatgtctcctctctctttccactctgggaaacctaggtttctgccattctgggtgaccctgtatttctttctggtgcccattccatttgtccagttaatacttcctcttaaaaatctccaagaagctgggtctccagatcccatttagaaccaaccaggtgctgaaaacacatgtagataatggccatcatcctaagcccaaagtagaaaatggtagaaggtagtgggtagaagtcactatataaggaaggggatgggattttccattctaaaagttttggagagggaaatccaggctattaaagtcactaaatttctaagtatgtccatttcccatctcagcttcaagggaggtgtcagcagtattatctccactttcaatctccctccaagctctactctggaggagtctgtcccactctgtcaagtggaatccttccctttccaactctacctccctcactcagctcctttcccctgatcagagaaagggatcaagggggttgggaggggggaaagagaccagccttggtccctaagcctccagaaacgtcttcttaatccccaccttttcttactcccaaaaaagaatgaacacccctgactctggagtggtgtatactgccacatcagtgtttgagtcagtccccagaggagaggggaaccctcctccatcttttttgcaacatctcatttcttccttttgctgttgcttcccccctcacacacttggttttgttctatcctacatttgagatttctattttatgttgaacttgctgctttttttcatattgaaaagatgacatcgccccaagagccaaaaataaatgggaattgaaaaaaaaaaaaaaaaaaaaaaaaaaaaa

SEQ ID NO: 2355 - DNA, 1591 bp, Homo sapiens
atataagcgttggcggagcgtcggttgtagcactctgcgcgcccgctcttctgctgctgtttgtctacttcctcctgcttccccgccgccgccgccgccatcatgagggaaatcgtgcacttgcaggccgggcagtgcggcaaccaaatcggcgccaagttttgggaggtgatcagcgatgagcacggcatcgaccccacgggcacctaccacggggacagcgacctgcagctggaacgcatcaacgtgtactacaatgaggccaccggcggcaagtacgtgccccgcgccgtgctcgtggatctggagcccggcaccatggactccgtgcgctcggggcccttcgggcagatcttccggccggacaacttcgttttcggtcagagtggtgctgggaacaactgggccaaggggcactacacagaaggcgcggagctggtggactcggtgctggatgttgtgagaaaggaggctgagagctgtgactgcctgcagggtttccagctgacccactccctgggtggggggactgggtctgggatgggtaccctcctcatcagcaagatccgggaggagtacccagacaggatcatgaacacgtttagtgtggtgccttcgcccaaagtgtcagacacagtggtggagccctacaacgccaccctctcagtccaccagctcgtagaaaacacagacgagacctactgcattgataacgaagctctctacgacatttgcttcagaaccctaaagctgaccacgcccacctatggtgacctgaaccacctggtgtctgctaccatgagtggggtcaccacctgcctgcgcttcccaggccagctcaatgctgacctgcggaagctggctgtgaacatggtcccgtttccccggctgcacttcttcatgcccggctttgccccactgaccagccggggcagccagcagtaccgggcgctgaccgtgcccgagctcacccagcagatgtttgatgccaagaacatgatggctgcctgcgacccccgccatggccgctacctgacggttgccgccgtgttcaggggccgcatgtccatgaaggaggtggatgagcaaatgcttaatgtccaaaacaaaaacagcagctattttgttgagtggatccccaacaatgtgaaaacggctgtctgtgacatcccacctcgggggctaaaaatgtccgccaccttcattggcaacagcacggccatccaggagctgttcaagcgcatctccgagcagttcacggccatgttccggcgcaaggccttcctgcactggtacacgggcgagggcatggacgagatggagttcaccgaggccgagagcaacatgaatgacctggtgtccgagtaccagcagtaccaggatgccacagccgaggaggagggcgagttcgaggaggaggctgaggaggaggtggcctagagccttcagtcactggggaaagcagggaagcagtgtgaactctttattcactcccagcctgtcctgtggcctgtcccactgtgtgcacttgctgttttccctgtccacatccatgctgtacagacaccaccattaaagcattttcatagtg

SEQ ID NO: 2356 - DNA, 1747 bp, Homo sapiens
  misc_feature (1636)..(1638): n is a, c, g, or t
gatctagtcttactaaagacgtgggaggaagttctccagctgagcagctttccccaacgtggaagggaccatagcaaggacccctgagttctccaacagacgttcaacgccaggggattcacaggtgggtgcacctgtgtggaagtaaagctgttgcttattctgggagcccaatcctaggctgagggaggtgggcgcggggctgtttaagcgttggcggaggccgggctgggtcgctgcgcgtctgctcctccttctcgcgcttctgctgccgccctaatcctgccttggccatgagggaaatcgtgctcacgcagaccgggcagtgcgggaaccagatcggggccaagttctgggaggtgatctctgatgaacatgccatcgactccgctggcacctaccacggggacagccacctgcagctggagcgcatcaacgtgcaccaccacgaggccagcggcaggtacgtgccccgcgctgtgctcgtggatctggagccgggcaccatggactctgtgcgctcggggcccttcgcggaggtcttcaggccagacaacttcatttcccgtcagtgtggggccggaaacaactgggccaagggacgctacaccgaaggcgcggagctgatggagtcagtgatggacgttgtcagaaaggaggctgagagctgtgactgcctgcagggtttccagctgacccactccctgggtggggggactgggtctgggatgggtacccttctgctcagtaagatccgggaggagtacccagacaggatcataaacacattcagcatcctgccctcgcccaaggtgtcggacaccgtggtggagccctacaacgccaccctctcagtccaccagctcatagaaaacgcagatgagaccttttgcatagataacgaagcgctatatgacatatgttccaggaccctaaaactgcccacacccacctatggtgacctgaaccacctggtgtctgctaccgtgagtggggtcaccacgtgcctgcgcttcccaggccagctgaatgctgacctgcggaagctggccgtgaacatggtcccgtttccccggctgcatttcttcatgcccggctttgccccactgaccagccagggcagccagcagtaccgggccttgactgtggctgagctcacccagcagatgtttgatgctaagaacatgatggctgcccgtgacccccgtcacggctgctacctaacggcggctgccattttcaggggtcgcatgcccatgagggaggtggatgaacagatgttcaacattcaagataagaacagcagctactttgctgactggctccccaacaacataaaaacagccgtctgtgacatcccaccctgggggctaaaaatgtcagtcaccttcactgggaacaacacagccgtccaggaactcaagcgggtctcagagcagtttacagcaacgttcaggcgcaaggccttcctccactggtacacgggcgagggcatggatgagatggaattcactgaggccgagagcaacatgaacgacttggtgtctgaatatcagcaatatcaggatgccacggccgagggagaaggagtatgaggaggaggaggtggcctagaactctccttttctaggtaaannngggaagcagtgtggatccttcactgtgttctgacagccatgtgtcactatgcgctcgttcatttgtgtcttcacatctcctgctgcattttaaagcatttttatagtat

SEQ ID NO: 2357 - DNA, 2096 bp, Homo sapiens
gagccggcggcgcaccaccatgacccagtcggtggtcgtacaggtcggccagtgcggaaaccagatcggctgctgcttctgggacctggcactaagggagcacgccgcggtcaaccagaaaggaatttatgatgaggcaataagcagcttctttagaaatgtggacaccagagtggttggtgatggtggaagtatttccaagggaaaaatatgttctttaaaagcacgagcagtcttgattgatatggaagaaggggtagtgaatgaaattctgcagggaccactgagagatgtatttgatacgaaacagctcatcactgatatttctggctcaggaaataattgggccgtgggtcacaaagttttcggcagtctttaccaagaccagattttagagaaattcagaaagtcggcagagcactgtgattgcttgcagtgtttctttataatacattccatgggaggaggaacaggatctggacttggcacatttcttttaaaggtgcttgaagacgaattcccagaagtatacagatttgtgacttccatttatccttctggtgaggatgatgtcataacctcaccttataatagcatcttggcaatgaaggaacttaatgagcatgcagactgtgtattgcccattgacaatcaatctttatttgacatcattagcaaaatcgacctcatggtgaattctggaaagttgggtacaactgtgaagccaaagagtctggttacttcaagttctggggctttaaaaaagcagcataagaagccctttgatgcaatgaataacattgtggcaaatttgctcctcaacctaacgagctctgcaagatttgaagggtcccttaatatggaccttaatgaaatcagcatgaatttagttccttttcctcaacttcattatctcgtgtcaagcctaacacctctgtatacactgacagatgttaacattcctcctagaagattggatcagatgttttcagatgcctttagtaaagatcaccagctgcttcgggcagaccccaaacacagtctttacctcgcctgtgcactcatggttagaggaaatgtacaaatttcagatcttcgtagaaatattgaaagattaaaaccatctctacaatttgtctcctggaatcaagaaggctggaagaccagcctgtgttccgtacctcctgtgggccattctcattcgttattagctttagcaaataacacatgtgtgaagcccaccttcatggaactgaaagagagattcatgaggctctacaagaaaaaggctcaccttcatcactatctacaagttgaagggatggaagaaagctgtttcacagaagctgtgtcatctttatcagcactcatacaggaatatgaccaactggacgccacaaaaaacatgcctgtgcaggatttacccagactaagcatagctatgtgaaaaagaaaccctcaaaaatactttcttaatttcacattgttttttctgacctttctgtttcaacatttttgtaatttggaaactccagttttttcatattatcgggaaatatttttgtctaaaagagtgatttctgtttaatcgcaatttgttggtaataccaatgtgtgaaattagtgaaatcttagtaccttaacttcaaacatttctcttcagaaaagttcccttttctaaaattgagataacatagttcttgaatattttgctgtatttatagcctcatatttaggcatttatgcactgatgtgtcttcaataaaaatcttgtacagatatatttttataattatttataatttatattttgatattctatttaagttatcctgattctttaaaagtagttattgggagtagaagaacacaatataaatatttccgtgtaatagccaccaacttttcaggcataggttttattacaactgttaaggaggttttgcttcttctttagataacaacttgtttgcccaaaagaatcctaatttgtacacttaacatgtatttgtattaaactttttaaataattgctttcttatcaaaccaattgattttataataaatgtctatatttttcaaaaaaaaaaaaaaaa

SEQ ID NO: 2358 - DNA, 3693 bp, Homo sapiens
cgcgccccgggctcggccgacccggcggggatctaggggtgggcgacttcgcgggaccgtggcgcatgtttcctgggagttactgatcatcttctttgaagaaacatgaagttacactatgttgctgtgcttactctagccatcctgatgttcctgacatggcttccagaatcactgagctgtaacaaagcactctgtgctagtgatgtgagcaaatgcctcattcaggagctctgccagtgccggccgggagaaggcaattgctcctgctgtaaggagtgcatgctgtgtcttggggccctttgggacgagtgctgtgactgtgttggtatgtgtaatcctcgaaattatagtgacacacctccaacttcaaagagcacagtggaggagctgcatgaaccgatcccttctctcttccgggcactcacagaaggagatactcagttgaattggaacatcgtttctttccctgttgcagaagaactttcacatcatgagaatctggtttcatttttagaaactgtgaaccagccacaccaccagaatgtgtctgtccccagcaataatgttcacgcgccttattccagtgacaaagaacacatgtgtactgtggtttattttgatgactgcatgtccatacatcagtgtaaaatatcctgtgagtccatgggagcatccaaatatcgctggtttcataatgcctgctgcgagtgcattggtccagaatgtattgactatggtagtaaaactgtcaaatgtatgaactgcatgttttaaagaagacaaatgcaaaccaaagcaacttagtaaaataataggtataaaaagttattctgtaagtctgttggttgtatcttgtatcagaatcccagtaagttaagttgtaaagactttggaataagtttcttttaaaaatatgacatagccagtgatgtgtttaattatataactgttcttactgattttattgccccctagcaataagccctttcctttgaatacatgtacaactttggtcatatgagaagcaggtgcgcagagaattccttgaaagatctgaggtttttaacataaagtctgatgtggttttcctctagcattccaaaaggtttttgctttgaaagtgttagcagaagcatgttgatgtgaattatgatttcttcatgtgctactgttagcacactgagtttttatagttgcacatcattcctcattgtgccttgttttatccattttataaatagagtagatatttgatataccactctgataactcatataaaaatatcatcataaaaagcttaatttcatcccttttatgttggttttaaaaggtaaatgcttaccatattttataattgagaactcttacatagtagaatccattctataatacatgtgttgacaaagctttagagaaagtttcctattctcttccatttcccctgcccaaagtgctgacataggcagtgatgaagaatctttaccaagattttcagggtgtacctatgaaattgctttaaatgcactgctggtgtaaataattagcaagcaaaagcgtttctgtgacttcaggtaccagcttaaagagcactagggatggggaacgaatgccaaatcagactccacctagagcaccaggaaacagcttgtaccctggtagggaaatggtgtcgctgaaaggggaggctgagccagtgcgagactgaacttgtgcagccttagccaagacaaagcagtgtttttcagcagacggctgatgggacaggaattgaagaagagaattgactcgtatgaacaggacagggtgaaaatgctgggaattataatgggaaacaaaactatctatgttcatattttgtaatatttcatttgttaagtttatatctggatataatgttctttttaaacaagtataatcatatcgtcggaggttaagattatgaaattttaaaatctctattcaagatgatgttcactccaaatacactacagaatttagtcaacattttatataatgtttcaataaatgtttctttcaataaagatactatgtgcccttcatagtaataaaatctcaatcttaaagcatgaatctaaaacataaatatttatattacagactcaattttacaaaattactaattgctctagtgcatatttgaactacaagcaactttttaggaatacctctttatacgtctacatattttagtatataaaaatagataatgctcttggacacattttgtattattcatgatctgaatagtagttagttaaaagatcatttgtaatattatgatcaactgttataaattaaggtcttaataccttttctgctctttcaaataactctaatgaatattcaagatattttagccttttaaaaagttgagatttagctcatggatatattttttggtagggaaacattagggtctccttttcttccttttacctagaatgcctcatttaaaagtgccttgaaaacatttagctccccttcttcatgagcatctgtagagctgaaagtattctggaactttagacagaaagctgaaaggaatctgcagtctcctgctgcagttcaactctgctgtttttcagtcatttcctactgtgagtggagtgatgtttgtgtgtgtgttggcaacatgcctaatgttttcttaatgatgacaacaaatattttaaaactgcatttatcattttttaggtcttcattaaattttaaaatgtaatatctgtttcccaccccctacattaggaggataatttcttaaaccacattgttttaattgatttttcttatcttgatttctttcattagaaactatccctaaatgtaaagatcttttgccttcaaatttggcttattttttctgatttatgagggtttgaaagaaagaattcacctaaaagattccatttccagttttataatgtatttcaggttctgaataacaatatttttccaaattgaaagtaaatattcaagaagttgatagcctggttaaaagttagatcctctattaccattctaagcacattcacttctatattgaagttttggtaaaaattcttttttcttttttaataaaaaattaggttattactttttttataaccagatttttaaagcactaggttttaaatcagtgggtatcataaaagccatatataaaagatcctttcttatagtaagacttgtgcttgttagcaggtttttctgttagtttttcccccataacatttaattattactaaaattgtatttacaatagtggtgccaaatcaaatggtaatttaaataaaatctattctgtgtttatgtagggtggtataaaaaagaggtcttcatttagacatgtgatttctaaaattccagaaagcaaaattgataagatgttagaaatttggaccgttatttataatcagggtagcattaaaatggagaaaagaaagttttctgaaaaaatgcagtaaatataagccacatttctaaagtttatttttatgaaagcttcttttaagattttgaaatctattctgcattcccaagagtttatgtttattgtattttatatgatctacaacatataaaattgtgtatttttctttggttgtccctattaacaaaaaagtattttaataaaaaattgaaatgaaaaaaaaaaaaaaaaaaaaaaa

SEQ ID NO: 2359 - DNA, 2914 bp, Homo sapiens
gatttcagttgaaagatgtgtttttgtgagtagagcaccgcagaagaactgaagactgttgtgtgctccccgcagaaggggctaccatgatcctttcctcctataacaccatccagtcggttttctgttgctgctgttgctgttcagtgcagaagcgacaaatgagaacacagataagcctgagcacagatgaagagcttccagaaaaatacacccagcgtcgcaggccgtggctcagccaattgtcaaataagaagcaatccaacacgggccgtgtgcagccgtcaaaacgaaagccactgcctcccctcccaccctctgaggttgctgaagagaagatccaagtcaaggcactttatgattttctgcccagagaaccctgtaatttagccttaaggagagcagaagaatacctgatactggagaaatacaatcctcactggtggaaggcaagagaccgtttggggaatgaaggcttaatcccaagcaactatgtgactgaaaacaaaataactaatttagaaatatatgagtggtaccatagaaacattaccagaaatcaggcagaacatctattgagacaagagtctaaagaaggtgcatttattgtcagagattcaagacatttaggatcctacacaatttccgtatttatgggagctagaagaagtacggaggctgccataaaacattatcagataaaaaagaatgactcaggacagtggtatgtggctgaaagacacgcctttcaatcaatccctgagttaatctggtatcaccagcacaatgcagccggtctcatgactcgtctccgatatccagttgggctgatgggcagttgtttaccagccacagctgggtttagctacgaaaagtgggagatagatccatctgagttggcttttataaaggagattggaagcggtcagtttggagtggtccatttaggtgaatggcggtcacatatccaggtagctatcaaggccatcaatgaaggctccatgtctgaagaggatttcattgaagaggccaaagtgatgatgaaattatctcattcaaagctagtgcaactttatggagtctgtatacagcggaagcccctttacattgtgacagagttcatggaaaatggctgcctgcttaactatctcagggagaataaaggaaagcttaggaaggaaatgctactgagtgtatgccaggatatatgtgaaggaatggaatatctggagaggaatggctatattcatagggatttggcggcaaggaattgtttggtcagttcaacatgcatagtaaaaatttcagactttggaatgacaaggtacgttttggatgatgagtatgtcagttcttttggagccaagttcccaatcaagtggtcccctcctgaagtttttcttttcaataagtacagcagtaaatctgatgtctggtcatttggagttttaatgtgggaagtttttacagaaggaaaaatgccttttgaaaataagtcaaatttgcaagtcgtggaagctatttctgaaggcttcaggctatatcgccctcacctggcaccaatgtccatatatgaagtcatgtacagctgctggcatgagaaacctgaaggccgccctacatttgccgagctgctgcgggctgtcacagagattgcggaaacctggtgaccggaaacagaatgccaacccaaagagtcatcttgcaaaactgtcatttattgtgaatatcttcaccatatggggtcacttatggtgaatatctttcttcagagttgctgactcttgaaaacagtgcaaagatcacagtttttaaaagttttaaaaatttaagaatattcacacaatcgtttttctatgtgtgagagggatttgcacactcttatttttctgtaaaatatttcacatcccaaatgtgaagaagtgaaaaagacttcgcagcagtcttcattgtggtgctcttcatgatcatagccccaggaacccttgaggttcttcttcacaaggctgagagtgcttccttcttgaagacgagtgacattcatcacttcagtgatccatgcatagaatatgaaaataaattcttccaactcatgggataaaggggactcccttgaagaatttcatgtttttgggctgtatagctctttacagaaaatgcacctttataaatcacatgaatgttagtattctggaaatgtcttttgttaatataatcttcccatgttatttaacaaattgtttttgcacatatctgattatattgaaagcagttttttgcattcgagttttaaacactgttataaaatgtagccaaagctcacctttgaacagatcccggtgacattctatttccaggaaaatccggaacctgattttagttctgtgattttacactttttacatgtgagattggacagtttcagaggccttattttgtcatactaagtgtctcctgtaattttcaggaagatgatttgttctttccagaagaggagacaaaagcaagatagccaaatgtgacatcaagctccattgtttcggaaatccaggattttgaattcgagatgaaacaaccagcaatcacagttaaatcttaactttgcctgcactctttgtaggaatgatcagaaatttatctttatcattctgagtgcttcaggagtacaataggaagaaagatactggagaaagcactaatgtaatcaccatgaagtctgacaacaggagcccattatttgcgtactgtcccaccctgtatcatggttctctgggaacaagctttatgattctcattagagtttatttgttgattgtcagtagttgcgacttttaaattatatttcccccactcaaagaatggtatctttatatatcaatgacattcaataaatgtgtattatttctaatgagaa

SEQ ID NO: 2360 - DNA, 2953 bp, Homo sapiens
atatagagacgtttccgcctcctgcttgaaactaacccctctttttctccaaaggagtgcttgtggagatcggatcttttctccagcaattgggggaaagaaggctttttctctgaattcgcttagtgtaaccagcggcgtatattttttaggcgccttttcgaaaacctagtagttaatattcatttgtttaaatcttattttatttttaagctcaaactgcttaagaataccttaattccttaaagtgaaataattttttgcaaaggggtttcctcgatttggagctttttttttcttccaccgtcatttctaactcttaaaaccaactcagttccatcatggtgatgttcaagaagatcaagtcttttgaggtggtctttaacgaccctgaaaaggtgtacggcagtggcgagaaggtggctggccgggtgatagtggaggtgtgtgaagttactcgtgtcaaagccgttaggatcctggcttgcggagtggctaaagtgctttggatgcagggatcccagcagtgcaaacagacttcggagtacctgcgctatgaagacacgcttcttctggaagaccagccaacaggtgagaatgagatggtgatcatgagacctggaaacaaatatgagtacaagttcggctttgagcttcctcaggggcctctgggaacatccttcaaaggaaaatatgggtgtgtagactactgggtgaaggcttttcttgaccgcccgagccagccaactcaagagacaaagaaaaactttgaagtagtggatctggtggatgtcaatacccctgatttaatggcacctgtgtctgctaaaaaagaaaagaaagtttcctgcatgttcattcctgatgggcgggtgtctgtctctgctcgaattgacagaaaaggattctgtgaaggtgatgagatttccatccatgctgactttgagaatacatgttcccgaattgtggtccccaaagctgccattgtggcccgccacacttaccttgccaatggccagaccaaggtgctgactcagaagttgtcatcagtcagaggcaatcatattatctcagggacatgcgcatcatggcgtggcaagagccttcgggttcagaagatcaggccttctatcctgggctgcaacatccttcgagttgaatattccttactgatctatgttagcgttcctggatccaagaaggtcatccttgacctgcccctggtaattggcagcagatcaggtctaagcagcagaacatccagcatggccagccgaaccagctctgagatgagttgggtagatctgaacatccctgataccccagaagctcctccctgctatatggatgtcattcctgaagatcaccgattggagagcccaaccactcctctgctagatgacatggatggctctcaagacagccctatctttatgtatgcccctgagttcaagttcatgccaccaccgacttatactgaggtggatccctgcatcctcaacaacaatgtgcagtgagcatgtggaagaaaagaagcagctttacctacttgtttctttttgtctctcttcctggacactcactttttcagagactcaacagtctctgcaatggagtgtgggtccaccttagcctctgacttcctaatgtaggaggtggtcagcaggcaatctcctgggccttaaaggatgcggactcatcctcagccagcgcccatgttgtgatacaggggtgtttgttggatgggtttaaaaataactagaaaaactcaggcccatccattttctcagatctccttgaaaattgaggccttttcgatagtttcgggtcaggtaaaaatggcctcctggcgtaagcttttcaaggttttttggaggctttttgtaaattgtgataggaactttggaccttgaacttatgtatcatgtggagaagagccaatttaacaaactaggaagatgaaaagggaaattgtggccaaaactttgggaaaaggaggttcttaaaatcagtgtttcccctttgtgcacttgtagaaaaaaaagaaaaaccttctagagctgatttgatggacaatggagagagctttccctgtgattataaaaaaggaagctagctgctctacggtcatctttgcttaagagtatactttaacctggcttttaaagcagtagtaactgccccaccaaaggtcttaaaagccatttttggagcctattgcactgtgttctcctactgcaaatattttcatatgggaggatggttttctcttcatgtaagtccttggaattgattctaaggtgatgttcttagcactttaattcctgtcaaattttttgttctccccttctgccatcttaaatgtaagctgaaactggtctactgtgtctctagggttaagccaaaagacaaaaaaaattttactacttttgagattgccccaatgtacagaattatataattctaacgcttaaatcatgtgaaagggttgctgctgtcagccttgcccactgtgacttcaaacccaaggaggaactcttgatcaagatgccgaaccctgtgttcagaacctccaaatactgccatgagaaactagagggcaggtcttcataaaagccctttgaacccccttcctgccctgtgttaggagatagggatattggcccctcactgcagctgccagcacttggtcagtcactctcagccatagcactttgttcactgtcctgtgtcagagcactgagctccacccttttctgagagttattacagccagaaagtgtgggctgaagatggttggtttcatgtttttgtattatgtatctttttgtatggtaaagactatattttgtacttaaccagatatatttttaccccagatggggatattctttgtaaaaaatgaaaataaagtttttttaatggaaaaaaaaaaaaaaaaaaaaaaaaaaaa

SEQ ID NO: 2361 - DNA, 4224 bp, Homo sapiens
gttcgagcttgtgttcccccggaagggtgagtctggacgcgggcgcggaaggagcgcggccggaggtcctcaggaagaagccgcggggactggctgcgcttgacaggctgcacttggatgggagcacctggtgcctcgggactgctccgatgcccgggtctgtgctgaatgtgtaatatgcggaactatattgaaacattacaaccatcttttgatggcaacaccctgaggacctcccttttccagatggggaaactgaggcccagaattgctaagtggcttgcttgagttgacacagggagctccaggactcaccctcagctgagccacctgccgggagcatgcctctgcgccactgggggatggccaggggcagtaagcccgttggggatggagcccagcccatggctgccatgggaggcctgaaggtgcttctgcactgggctggtccaggcggcggggagccctgggtcactttcagtgagtcatcgctgacagctgaggaagtctgcatccacattgcacataaagttggtatcactcctccttgcttcaatctctttgccctcttcgatgctcaggcccaagtctggttgcccccaaaccacatcctagagatccccagagatgcaagcctgatgctatatttccgcataaggttttatttccggaactggcatggcatgaatcctcgggaaccggctgtgtaccgttgtgggcccccaggaaccgaggcatcctcagatcagacagcacaggggatgcaactcctggacccagcctcatttgagtacctctttgagcagggcaagcatgagtttgtgaatgacgtggcatcactgtgggagctgtcgaccgaggaggagatccaccactttaagaatgagagcctgggcatggcctttctgcacctctgtcacctcgctctccgccatggcatccccctggaggaggtggccaagaagaccagcttcaaggactgcatcccgcgctccttccgccggcatatccggcagcacagcgccctgacccggctgcgccttcggaacgtcttccgcaggttcctgcgggacttccagccgggccgactctcccagcagatggtcatggtcaaatacctagccacactcgagcggctggcaccccgcttcggcacagagcgtgtgcccgtgtgccacctgaggctgctggcccaggccgagggggagccctgctacatccgggacagtggggtggcccctacagaccctggccctgagtctgctgctgggcccccaacccacgaggtgctggtgacaggcactggtggcatccagtggtggccagtagaggaggaggtgaacaaggaggagggttctagtggcagcagtggcaggaacccccaagccagcctgtttgggaagaaggccaaggctcacaaggcagtcggccagccggcagacaggccgcgggagccactgtgggcctacttctgtgacttccgggacatcacccacgtggtgctgaaagagcactgtgtcagcatccaccggcaggacaacaagtgcctggagctgagcttgccttcccgggctgcggcgctgtccttcgtgtcgctggtggacggctatttccgcctgacggccgactccagccactacctgtgccacgaggtggctcccccacggctggtgatgagcatccgggatgggatccacggacccctgctggagccatttgtgcaggccaagctgcggcccgaggacggcctgtacctcattcactggagcaccagccacccctaccgcctgatcctcacagtggcccagcgtagccaggcaccagacggcatgcagagcttgcggctccgaaagttccccattgagcagcaggacggggccttcgtgctggagggctggggccggtccttccccagcgttcgggaacttggggctgccttgcagggctgcttgctgagggccggggatgactgcttctctctgcgtcgctgttgcctgccccaaccaggagaaacctccaatctcatcatcatgcggggggctcgggccagccccaggacactcaacctcagccagctcagcttccaccgggttgaccagaaggagatcacccagctgtcccacttgggccagggcacaaggaccaacgtgtatgagggccgcctgcgagtggagggcagcggggaccctgaggagggcaagatggatgacgaggaccccctcgtgcctggcagggaccgtgggcaggagctacgagtggtgctcaaagtgctggaccctagtcaccatgacatcgccctggccttctacgagacagccagcctcatgagccaggtctcccacacgcacctggccttcgtgcatggcgtctgtgtgcgcggccctgaaaatatcatggtgacagagtacgtggagcacggacccctggatgtgtggctgcggagggagcggggccatgtgcccatggcttggaagatggtggtggcccagcagctggccagcgccctcagctacctggagaacaagaacctggttcatggtaatgtgtgtggccggaacatcctgctggcccggctggggttggcagagggcaccagccccttcatcaagctgagtgatcctggcgtgggcctgggcgccctctccagggaggagcgggtggagaggatcccctggctggcccccgaatgcctaccaggtggggccaacagcctaagcaccgccatggacaagtgggggtttggcgccaccctcctggagatctgctttgacggagaggcccctctgcagagccgcagtccctccgagaaggagcatttctaccagaggcagcaccggctgcccgagccctcctgcccacagctggccacactcaccagccagtgtctgacctatgagccaacccagaggccatcattccgcaccatcctgcgtgacctcacccggctgcagccccacaatcttgctgacgtcttgactgtgaacccggactcaccggcgtcggaccctacggttttccacaagcgctatttgaaaaagatccgagatctgggcgagggtcacttcggcaaggtcagcttgtactgctacgatccgaccaacgacggcactggcgagatggtggcggtgaaagccctcaaggcagactgcggcccccagcaccgctcgggctggaagcaggagattgacattctgcgcacgctctaccacgagcacatcatcaagtacaagggctgctgcgaggaccaaggcgagaagtcgctgcagctggtcatggagtacgtgcccctgggcagcctccgagactacctgccccggcacagcatcgggctggcccagctgctgctcttcgcccagcagatctgcgagggcatggcctatctgcactcgcagcactacatccaccgagacctagccgcgcgcaacgtgctgctggacaacgacaggctggtcaagatcggggactttggcctagccaaggccgtgcccgaaggccacgagtactaccgcgtgcgcgaggatggggacagccccgtgttctggtatgccccagagtgcctgaaggagtataagttctactatgcgtcagatgtctggtccttcggggtgaccctgtatgagctgctgacgcactgtgactccagccagagcccccccacgaaattccttgagctcataggcattgctcagggtcagatgacagttctgagactcactgagttgctggaacgaggggagaggctgccacggcccgacaaatgtccctgtgaggtctatcatctcatgaagaactgctgggagacagaggcgtcctttcgcccaaccttcgagaacctcatacccattctgaagacagtccatgagaagtaccaaggccaggccccttcagtgttcagcgtgtgctgaggcacaatggcagccctgcctgggaggactggaccaggcagtggctgcagagggagcctcctgctccctgctccaggatgaaaccaagagggggatgtcagcctcacccacaccgtgtgccttactcctgtctagagaccccacctctgtgaacttatttttctttcttggccgtgagcctaaccatgatcttgagggacccaacatttgtaggggcactaatccagcccttaaatcccccagcttccaaacttgaggcccaccatctccaccatctggtaataaactcatgttttctctgaaaaaaaaaaaaaaaaaa

SEQ ID NO: 2362 - DNA, 3949 bp, Homo sapiens
gcggtggcgcgggagcggccccggggaccccgcgctgctgacggcggcgaccgcggccggaggcgggcgcgggtctcggaggcggtcgcctcagcaccgccccacgggcggccccagcccctcccgcagccctcctccctcccgctcccttcccgccgcctcctccccgccctcctccctcctcgctcgcgggccgggcccggcatggtgcggcgtcgccgccgatggcgctgaggcggagcatggggcggccggggctcccgccgctgccgctgccgccgccaccgcggctcgggctgctgctggcggctctggcttctctgctgctcccggagtccgccgccgcaggtctgaagctcatgggagccccggtgaagctgacagtgtctcaggggcagccggtgaagctcaactgcagtgtggaggggatggaggagcctgacatccagtgggtgaaggatggggctgtggtccagaacttggaccagttgtacatcccagtcagcgagcagcactggatcggcttcctcagcctgaagtcagtggagcgctctgacgccggccggtactggtgccaggtggaggatgggggtgaaaccgagatctcccagccagtgtggctcacggtagaaggtgtgccatttttcacagtggagccaaaagatctggcagtgccacccaatgcccctttccaactgtcttgtgaggctgtgggtccccctgaacctgttaccattgtctggtggagaggaactacgaagatcgggggacccgctccctctccatctgttttaaatgtaacaggggtgacccagagcaccatgttttcctgtgaagctcacaacctaaaaggcctggcctcttctcgcacagccactgttcaccttcaagcactgcctgcagcccccttcaacatcaccgtgacaaagctttccagcagcaacgctagtgtggcctggatgccaggtgctgatggccgagctctgctacagtcctgtacagttcaggtgacacaggccccaggaggctgggaagtcctggctgttgtggtccctgtgcccccctttacctgcctgctccgggacctggtgcctgccaccaactacagcctcagggtgcgctgtgccaatgccttggggccctctccctatgctgactgggtgccctttcagaccaagggtctagccccagccagcgctccccaaaacctccatgccatccgcacagattcaggcctcatcttggagtgggaagaagtgatccccgaggcccctttggaaggccccctgggaccctacaaactgtcctgggttcaagacaatggaacccaggatgagctgacagtggaggggaccagggccaatttgacaggctgggatccccaaaaggacctgatcgtacgtgtgtgcgtctccaatgcagttggctgtggaccctggagtcagccactggtggtctcttctcatgaccgtgcaggccagcagggccctcctcacagccgcacatcctgggtacctgtggtccttggtgtgctaacggccctggtgacggctgctgccctggccctcatcctgcttcgaaagagacggaaagagacgcggtttgggcaagcctttgacagtgtcatggcccggggagagccagccgttcacttccgggcagcccggtccttcaatcgagaaaggcccgagcgcatcgaggccacattggacagcttgggcatcagcgatgaactaaaggaaaaactggaggatgtgctcatcccagagcagcagttcaccctgggccggatgttgggcaaaggagagtttggttcagtgcgggaggcccagctgaagcaagaggatggctcctttgtgaaagtggctgtgaagatgctgaaagctgacatcattgcctcaagcgacattgaagagttcctcagggaagcagcttgcatgaaggagtttgaccatccacacgtggccaaacttgttggggtaagcctccggagcagggctaaaggccgtctccccatccccatggtcatcttgcccttcatgaagcatggggacctgcatgccttcctgctcgcctcccggattggggagaacccctttaacctacccctccagaccctgatccggttcatggtggacattgcctgcggcatggagtacctgagctctcggaacttcatccaccgagacctggctgctcggaattgcatgctggcagaggacatgacagtgtgtgtggctgacttcggactctcccggaagatctacagtggggactactatcgtcaaggctgtgcctccaaactgcctgtcaagtggctggccctggagagcctggccgacaacctgtatactgtgcagagtgacgtgtgggcgttcggggtgaccatgtgggagatcatgacacgtgggcagacgccatatgctggcatcgaaaacgctgagatttacaactacctcattggcgggaaccgcctgaaacagcctccggagtgtatggaggacgtgtatgatctcatgtaccagtgctggagtgctgaccccaagcagcgcccgagctttacttgtctgcgaatggaactggagaacatcttgggccagctgtctgtgctatctgccagccaggaccccttatacatcaacatcgagagagctgaggagcccactgcgggaggcagcctggagctacctggcagggatcagccctacagtggggctggggatggcagtggcatgggggcagtgggtggcactcccagtgactgtcggtacatactcacccccggagggctggctgagcagccagggcaggcagagcaccagccagagagtcccctcaatgagacacagaggcttttgctgctgcagcaagggctactgccacacagtagctgttagcccacaggcagagggcatcggggccatttggccggctctggtggccactgagctggctgactaagccccgtctgaccccagcccagacagcaaggtgtggaggctcctgtggtagtcctcccaagctgtgctgggaagcccggactgaccaaatcacccaatcccagttcttcctgcaaccactctgtggccagcctggcatcagtttaggccttggcttgatggaagtgggccagtcctggttgtctgaacccaggcagctggcaggagtggggtggttatgtttccatggttaccatgggtgtggatggcagtgtggggagggcaggtccagctctgtgggccctaccctcctgctgagctgcccctgctgcttaagtgcatgcattgagctgcctccagcctggtggcccagctattaccacacttggggtttaaatatccaggtgtgcccctccaagtcacaaagagatgtccttgtaatattcccttttaggtgagggttggtaaggggttggtatctcaggtctgaatcttcaccatctttctgattccgcaccctgcctacgccaggagaagttgaggggagcatgcttccctgcagctgaccgggtcacacaaaggcatgctggagtacccagcctatcaggtgcccctcttccaaaggcagcgtgccgagccagcaagaggaaggggtgctgtgaggcttgcccaggagcaagtgaggccggagaggagttcaggaacccttctccatacccacaatctgagcacgctaccaaatctcaaaatatcctaagactaacaaaggcagctgtgtctgagcccaacccttctaaacggtgacctttagtgccaacttcccctctaactggacagcctcttctgtcccaagtctccagagagaaatcaggcctgatgagggggaattcctggaacctggaccccagccttggtgggggagcctctggaatgcatggggcgggtcctagctgttagggacatttccaagctgttagttgctgtttaaaatagaaataaaattgaagact

SEQ ID NO: 2363 - DNA, 2876 bp, Homo sapiens
acagttctgacgtgagaggacaagaaacacaagcaaatataaaacattcaattctaagagaagttcatcagagacatccttcaggattgtgagctggattttcctctacgtgcttcagtcttctctacacaaagagctgcaaaccaggtctttgttttgcactcttatttcaagcagaatgagtgctcctaaactcctctctctgggctgtatcttcttccccttgctactttttcagcaggcccgggctcaattcccaagacagtgtgccactgttgaggctttgagaagtggtatgtgttgcccagacctgtcccctgtgtctgggcctgggacagaccgctgtggctcatcatcagggaggggcagatgtgaggcagtgactgcagactcccggccccacagccctcagtatccccatgatggcagagatgatcgggaggtctggcccttgcgcttcttcaataggacatgtcactgcaacggcaatttctcaggacacaactgtgggacgtgccgtcctggctggagaggagctgcctgtgaccagagggttctcatagtcaggagaaatcttctggacttaagtaaagaagaaaagaaccactttgtccgggccctggatatggcaaagcgcacaactcaccctttatttgtcattgccaccaggagatcagaagaaatactggggccagatggcaacacgccacaatttgagaacatttccatttataactactttgtttggacacactattactcagtcaaaaagactttccttggggtaggacaggaaagctttggtgaagtggatttctctcatgagggaccagcttttctcacatggcacaggtaccacctcctgcgtctggagaaagacatgcaggaaatgttgcaagagccttctttctcccttccttactggaattttgcaacggggaaaaatgtctgtgatatctgcacggatgacttgatgggatccagaagcaactttgattccactctaataagcccaaactctgtcttttctcaatggcgagtggtctgtgactccttggaagattatgataccctgggaacactttgtaacagcaccgaggatgggccaattaggagaaatccagctggaaatgtggccagaccaatggtgcaacgtcttcctgaaccacaggatgtcgctcagtgcttggaagttggtttatttgacacgcctcctttttattccaactctacaaacagtttccgaaacacagtggaaggttacagtgaccccacgggaaagtatgaccctgctgttcgaagtcttcacaatttggctcatctattcctgaatggaacagggggacaaacccatttgtctccaaatgatcctatttttgtcctcctgcacaccttcacagatgcagtctttgatgaatggctgaggagatacaatgctgatatatccacatttccattggaaaatgcccctattggacataatagacaatacaacatggtgccattctggcccccagtcaccaacacagaaatgtttgttactgctccagacaacctgggatacacttatgaaattcaatggccaagtcgggagtttagtgtacctgagataattgccatagcagtagttggcgctttgttactggttgcactcatttttgggactgcttcttatctgattcgtgccagacgcagtatggatgaagctaaccagcctctcctcactgatcagtatcaatgctatgctgaagaatatgaaaaactccagaatcctaatcagtctgtggtctaacaaatgccctactctcttatgcattagtatcacaaaaccacctggttgaatataatagattgagttattaactgtattttctttcactttattaccttctttctaatacaagcatatgttagcattaaagttctaggcatacttttcaaagctgggaagaccctttcagaatcttttcaatgggttttaattttcagttctatttaaaatggtgaatgacactaaactccatgatatttaaggatagtgtgaagatctttggcatgatttaaaggttgagtatgtgaagatataagtaagtgaactaccatgctttgtttacgtgtaaaggaaaataatgtttgatagtaaatgtccacttaaaatacatgaatgggcatttctaaaatgttaaaacataaacacatttccattcatggatatttgtcaacagatttaaagaaaaccacagttattaattaaagaaaattaattatgtgtagttataaaccaatgaaattttgattaaccttttcaaattaatgttccagtttgaagaccaatcaaatatattatttagtcaacatatactatttagtctcaggttcaaggctacaacaaaaatcaccatctttgtcaaactttggagagggaaaatcttcactttcttaagcaacaatggatattgcctgtgtttgccactgtgtttccctgcctctcaattcgctgaaaaaggaactacctatccttacatttcacctactaatgtctcttctaacatcttagaggtccatggagaaggcatatggagaacatgttttatactgctctataaatagtattccaatcactgtgcttaatttaaatagcattatcttatcatttatcagccttttatgtattttccaagtaaaatattaacatattatttcattggtcttcttttttatctggttctatatgaatgctattttttcccttctcttctaacatgaaatatattttctctttttgatcttgtgctatgaaacaatcttccaaagaactgtataaggtggtcataagtgaatattttaattaaaattggtaaaaataaataataaca

SEQ ID NO: 2364 - DNA, 971 bp, Homo sapiens
gtccgggtgacgtctcccgagggcgtcggcagggtcggcggcgtcggcagcagtgtcgacggcagcggcggcggcgggtgggaaatggcggagtatctggcctccatcttcggcaccgagaaagacaaagtcaactgttcattttatttcaaaattggagcatgtcgtcatggagacaggtgctctcggttgcacaataaaccgacgtttagccagaccattgccctcttgaacatttaccgtaaccctcaaaactcttcccagtctgctgacggtttgcgctgtgccgtgagcgatgtggagatgcaggaacactatgatgagttttttgaggaggtttttacagaaatggaggagaagtatggggaagtagaggagatgaacgtctgtgacaacctgggagaccacctggtggggaacgtgtacgtcaagtttcgccgtgaggaagatgcggaaaaggctgtgattgacttgaataaccgttggtttaatggacagccgatccacgccgagctgtcacccgtgacggacttcagagaagcctgctgccgtcagtatgagatgggagaatgcacacgaggcggcttctgcaacttcatgcatttgaagcccatttccagagagctgcggcgggagctgtatggccgccgtcgcaagaagcatagatcaagatcccgatcccgggagcgtcgttctcggtctagagaccgtggtcgtggcggtggcggtggcggtggtggaggtggcggcggacgggagcgtgacaggaggcggtcgagagatcgtgaaagatctgggcgattctgagccatgccatttttaccttatgtctgctagaaagtgttgtagttgattgaccaaaccagttcataaggggaattttttttaaaaaacaacaaaaaaaaaaacatacaaagatgggtttctgaataaaatttgtagtgataacagtaaaaaaaaaaaaaaaaaaa

SEQ ID NO: 2365 - DNA, 3148 bp, Homo sapiens
ggagagcgcgccacagaacgacttttacgcaggcgcagaagcctgtttcccctcacccgcggcttccaccctgcgcaggcgcaaaaagccgcgctggcaacctccgcagcggtcgcgcgcacccttcacccctcttgctgcttttgtctggcacaaccttctcaggccctccgcgaggccggccctttttttctttcactttccccacccggagagccaggtgccgagaactaggacctcgtccccttctctatcccttcccctgatccatctcgtctctgttctccttcccttttccgttcccgaagccggaaggagccgaggtacccacggaaaaagtcgaagctgtccccggagagtgaggccttcacgaagcggtggcggaaggagccgaagttctctgatcggaggcgtgagcaagtggcatctccggaaagagccgaaacacggactcgagcttaatcccaggaggggcccgagggcgagatccggaaatctccggaaagagccgaaggccgggacggttaggattgtcggaagtggccgattgcttggacagggccggcggagaagatcggagcaagtccgtggaagaagccaaagactgggacggattgaattgttggaagaacccgaactcgcagaggggactgggcgcagtggcacacgaggacacacggaaacctccgaacgttgaggagataatctcggaaaagttacggaaacctgggaagtcggcgaaaccctacgttcgggtgttttcggaagcagccgaagcggccgcctgcttcgccttcgtccagtatccggagatagccgaggcgcttcggagccaggctcggggggaggggcaagctcgcgggcgggcgggcgggtgagggggcggagcccgggcggggcggggagggctgccggaggcttgattaggtaggaggtggcgaagcgccggcggcggccggaagtagccgaagccagcggcggaagtagccgaagcggctggagcgggcggcaaggcgaggcgaaagctgcacagggccctacgcggccgcctcagcatgtcggacttcgacgagttcgagcggcagctcaacgagaataaacaagagcgggacaaggagaaccggcatcggaagcgcagccacagccgctctcggagccgggaccgcaaacgccggagccggagccgcgaccggcgcaaccgggaccagcggagcgcctcccgggacaggcgacgacgcagcaaacctttgaccagaggcgctaaagaggagcacggtggactgattcgttccccccgccacgagaagaagaagaaggtccgtaaatactgggacgtgccacccccaggctttgagcacatcaccccaatgcagtacaaggccatgcaagctgcgggtcagattccagccactgctcttctccccaccatgacccctgacggtctggctgtgaccccaacgccggtgcccgtggtcgggagccagatgaccagacaagcccggcgcctctacgtgggcaacatcccctttggcatcactgaggaggccatgatggatttcttcaacgcccagatgcgcctgggggggctgacccaggcccctggcaacccagtgttggctgtgcagattaaccaggacaagaattttgcctttttggagttccgctcagtggacgagactacccaggctatggcctttgatggcatcatcttccagggccagtcactaaagatccgcaggcctcacgactaccagccgcttcctggcatgtcagagaacccctccgtctatgtgcctggggttgtgtccactgtggtccccgactctgcccacaagctgttcatcgggggcttacccaactacctgaacgatgaccaggtcaaagagctgctgacatcctttgggcccctcaaggccttcaacctggtcaaggacagtgccacggggctctccaagggctacgccttctgtgagtacgtggacatcaacgtcacggatcaggccattgcggggctgaacggcatgcagctgggggataagaagctgctggtccagagggcgagtgtgggagccaagaatgccacgctggtgagccccccgagcaccatcaatcagacgcctgtgaccctgcaagtgccgggcttgatgagctcccaggtgcagatgggcggccacccgactgaggtcctgtgcctcatgaacatggtgctgcctgaggagctgctggacgacgaggagtatgaggagatcgtggaggatgtgcgggacgagtgcagcaagtacgggcttgtcaagtccatcgagatcccccggcctgtggacggcgtcgaggtgcccggctgcggaaagatctttgtggagttcacctctgtgtttgactgccagaaagccatgcagggcctgacgggccgcaagttcgccaacagagtggttgtcacaaaatactgtgaccccgactcttatcaccgccgggacttctggtagaggcggctgggggagggtgggggcagggctggctgggggcttctccccactcccgccccccccttatccccctctgaagacgatgggcagaggagtgacagccgcagacacacgacagccggcagcaactggaatggcagcaattaagggtggggggcgggggttggggggttggggggttagggcagggaggggactggggaagtgcgcacacagcccacacagacaacacgcacccacacagacacagagggaaggggttgggatggggacagggtgcacagcagggcggggtaggaccccagcccctcccaaaacagcctctccttctcccatagacccctttcttctccccttccccacggtaggaacatagcgtgtttatattttatggccaaactattttgaattttgttgtccggccctcagtgccctgccctctcccttaccaggaccacagctctgttccttcggcctctggtcctctctggtcccctcctgggtttcttacgtagttgatttttcctctttagtctcccccgacctgcgcccagccccgtggcccctgcccctctcctactctctgtggcagtttcatatttgctaagacgaatttgctcattaaacattttgttgtattttactttaaaaaaaaaaaaaaaaaa

SEQ ID NO: 2366 - DNA, 3136 bp, Homo sapiens
ggagagcgcgccacagaacgacttttacgcaggcgcagaagcctgtttcccctcacccgcggcttccaccctgcgcaggcgcaaaaagccgcgctggcaacctccgcagcggtcgcgcgcacccttcacccctcttgctgcttttgtctggcacaaccttctcaggccctccgcgaggccggccctttttttctttcactttccccacccggagagccaggtgccgagaactaggacctcgtccccttctctatcccttcccctgatccatctcgtctctgttctccttcccttttccgttcccgaagccggaaggagccgaggtacccacggaaaaagtcgaagctgtccccggagagtgaggccttcacgaagcggtggcggaaggagccgaagttctctgatcggaggcgtgagcaagtggcatctccggaaagagccgaaacacggactcgagcttaatcccaggaggggcccgagggcgagatccggaaatctccggaaagagccgaaggccgggacggttaggattgtcggaagtggccgattgcttggacagggccggcggagaagatcggagcaagtccgtggaagaagccaaagactgggacggattgaattgttggaagaacccgaactcgcagaggggactgggcgcagtggcacacgaggacacacggaaacctccgaacgttgaggagataatctcggaaaagttacggaaacctgggaagtcggcgaaaccctacgttcgggtgttttcggaagcagccgaagcggccgcctgcttcgccttcgtccagtatccggagatagccgaggcgcttcggagccaggctcggggggaggggcaagctcgcgggcgggcgggcgggtgagggggcggagcccgggcggggcggggagggctgccggaggcttgattaggtaggaggtggcgaagcgccggcggcggccggaagtagccgaagccagcggcggaagtagccgaagcggctggagcgggcggcaaggcgaggcgaaagctgcacagggccctacgcggccgcctcagcatgtcggacttcgacgagttcgagcggcagctcaacgagaataaacaagagcgggacaaggagaaccggcatcggaagcgcagccacagccgctctcggagccgggaccgcaaacgccggagccggagccgcgaccggcgcaaccgggaccagcggagcgcctcccgggacaggcgacgacgcagcaaacctttgaccagaggcgctaaagaggagcacggtggactgattcgttccccccgccacgagaagaagaagaaggtccgtaaatactgggacgtgccacccccaggctttgagcacatcaccccaatgcagtacaaggccatgcaagctgcgggtcagattccagccactgctcttctccccaccatgacccctgacggtctggctgtgaccccaacgccggtgcccgtggtcgggagccagatgaccagacaagcccggcgcctctacgtgggcaacatcccctttggcatcactgaggaggccatgatggatttcttcaacgcccagatgcgcctgggggggctgacccaggcccctggcaacccagtgttggctgtgcagattaaccaggacaagaattttgcctttttggagttccgctcagtggacgagactacccaggctatggcctttgatggcatcatcttccagggccagtcactaaagatccgcaggcctcacgactaccagccgcttcctggcatgtcagagaacccctccgtctatgtgcctggggttgtgtccactgtggtccccgactctgcccacaagctgttcatcgggggcttacccaactacctgaacgatgaccaggtcaaagagctgctgacatcctttgggcccctcaaggccttcaacctggtcaaggacagtgccacggggctctccaagggctacgccttctgtgagtacgtggacatcaacgtcacggatcaggccattgcggggctgaacggcatgcagctgggggataagaagctgctggtccagagggcgagtgtgggagccaagaatgccacgctgagcaccatcaatcagacgcctgtgaccctgcaagtgccgggcttgatgagctcccaggtgcagatgggcggccacccgactgaggtcctgtgcctcatgaacatggtgctgcctgaggagctgctggacgacgaggagtatgaggagatcgtggaggatgtgcgggacgagtgcagcaagtacgggcttgtcaagtccatcgagatcccccggcctgtggacggcgtcgaggtgcccggctgcggaaagatctttgtggagttcacctctgtgtttgactgccagaaagccatgcagggcctgacgggccgcaagttcgccaacagagtggttgtcacaaaatactgtgaccccgactcttatcaccgccgggacttctggtagaggcggctgggggagggtgggggcagggctggctgggggcttctccccactcccgccccccccttatccccctctgaagacgatgggcagaggagtgacagccgcagacacacgacagccggcagcaactggaatggcagcaattaagggtggggggcgggggttggggggttggggggttagggcagggaggggactggggaagtgcgcacacagcccacacagacaacacgcacccacacagacacagagggaaggggttgggatggggacagggtgcacagcagggcggggtaggaccccagcccctcccaaaacagcctctccttctcccatagacccctttcttctccccttccccacggtaggaacatagcgtgtttatattttatggccaaactattttgaattttgttgtccggccctcagtgccctgccctctcccttaccaggaccacagctctgttccttcggcctctggtcctctctggtcccctcctgggtttcttacgtagttgatttttcctctttagtctcccccgacctgcgcccagccccgtggcccctgcccctctcctactctctgtggcagtttcatatttgctaagacgaatttgctcattaaacattttgttgtattttactttaaaaaaaaaaaaaaaaaa

SEQ ID NO: 2367 - DNA, 3332 bp, Homo sapiens
gggaactcttagctgagcaggcgagagcatcatggataccgacttatatgatgagtttgggaattatattggaccagagcttgattctgatgaagatgatgatgaattgggtagagagaccaaagatcttgatgagatggatgatgatgacgacgacgatgacgtaggagatcatgacgatgaccaccctgggatggaggtggtgctgcatgaggacaagaagtactacccaacagccgaggaggtgtatggtcctgaggtggagaccatagttcaagaggaagacactcagcctctcacagaacccattattaagccagtgaaaaccaagaaattcactctgatggagcagacattacctgttacggtgtatgagatggatttcttggcggatctgatggataactcagagctcatcagaaatgtgaccctttgtggacatctccaccatggcaagacatgttttgtggattgtttaattgaacagactcacccggaaatcagaaagcgctatgaccaagatctgtgctatactgacatcctcttcacagagcaagagagaggtgtaggcatcaaaagcactcctgtgacagtggtcttgccagacaccaaaggaaaatcttatctcttcaatatcatggacactccaggacatgtgaatttctctgatgaggtcacagctggcttgcgcatctcagatggagtggtccttttcattgatgctgctgagggggtgatgctgaacacagagcggctgatcaagcatgcggtgcaggagaggctggcagtcactgtgtgcatcaacaagattgaccggctgatcctggagctgaagctgcctccaactgatgcttattacaagctgcgccacattgtggatgaggtcaatggattaataagcatgtattccactgatgagaacctgatcctttccccactcctgggtaacgtctgcttctccagctcccagtacagcatctgcttcacgctggtctcctttgccaagatctatgccgacacctttggtgacattaattaccaagaatttgctaaaagactctggggtgacatctacttcaaccctaagacgcgaaagttcaccaaaaaggccccaactagcagctcccagagaagtttcgtggagtttatcttggagcctctttataagatcctcgcccaggttgtaggtgacgtggacaccagcctcccacggaccctagacgagcttggcatccacctgacgaaggaggagctgaagctgaacatccgccccttgctcaggctggtctgcaaaaagttctttggcgagttcacaggctttgtggacatgtgtgtgcagcatatcccttctccaaaggtgggcgccaagcccaagattgagcacacctacaccggtggtgtggactccgacctcggcgaggctatgagtgactgtgaccctgatggccccctgatgtgccacactactaagatgtacagcacagatgatggagtccagtttcacgcctttggccgggtgctgagtggcaccattcatgctgggcagcctgtgaaggtactgggggagaactacaccctggaggatgaggaagactcccagatatgcaccgtgggccgcctttggatctctgtggccaggtaccacatcgaggtgaaccgtgttcctgctggcaactgggttctgattgaaggtgttgatcaaccaattgtgaagacagcaaccataaccgaaccccgaggcaatgaggaggctcagattttccgacccttgaagttcaataccacatctgttatcaagattgctgtggagccagtcaacccctcagagctgcccaagatgcttgatggcctgcgcaaggtcaacaagagctatccatccctcaccaccaaggtggaggagtctggcgagcatgtgatcctgggcactggggagctctacctggactgtgtgatgcatgatttgcggaagatgtactcagagatagacatcaaggtggctgacccagttgtcacgttttgtgagacggtggtggaaacatcctccctcaagtgctttgctgaaacgcctaataagaagaacaagatcaccatgattgctgagcctcttgagaagggcctggcagaggacatagagaatgaggtggtccagattacgtggaacaggaagaagctgggagagttcttccagaccaagtacgattgggatctgctggctgcccgttccatctgggcttttggccctgatgcgactggccccaacattctggtggatgatactctgccctctgaggtggacaaggctcttcttggttcagtgaaggacagcatcgttcaaggtttccagtggggaaccagggagggccccctctgtgatgaattgattcggaatgtcaagtttaagatcctggatgcggtggttgcccaggagcccctgcaccggggcgggggccagatcatccccacagccaggagagtcgtctactctgccttcctcatggctactcctcgtctgatggagccttactactttgtagaggtccaggcccctgcagattgcgtctctgcagtttataccgtcctggccaggcgcagggggcacgtgactcaggatgcacccatcccaggctcccctctgtacaccatcaaagcttttatcccggccatcgactcttttggctttgagactgatctccggactcacacccagggacaagccttttctctgtctgtcttccaccactggcagattgtgcctggtgatcccctggacaagagcattgtcatccgccccttggagccacagccagctcctcacctggcccgggaattcatgatcaaaacccgccgtaggaagggcctcagtgaagatgtgagcatcagcaaattcttcgatgatcctatgttgctggaacttgccaaacaggatgttgtgctcaattaccccatgtgagtgcgtggactcctgggagctcctgctccctacagtgggctgcaactcctgtacttgaagctgagacctcatatgacgtggccttcgtgttgtcagagagtgtctggaagctgctgttgccatcttgaacaactcaccaacctccaacccagagccccagtgagagaggagcatttggcctcctgcttccttctgtggcctctgccgggctccattcccaaggaaaagagaggagcttgggctcacagaaagagaaggggatgaaaccccaaggggccctatctttgggatttacatggaattttattttctacaagtttgaccttagccatggtttgcaagtgaacagaacattctgacctcaaaaaaaaaaaaaaaaaaa

SEQ ID NO: 2368 - DNA, 2801 bp, Homo sapiens
gctccgtgcgcaagcgctttcggcggcgattaggtggtttccggttccgctatcttctttttcttcagcgaggcggccgagctgacgcaaacatgcagatctttgtgaagaccctcactggcaaaaccatcacccttgaggtcgagcccagtgacaccattgagaatgtcaaagccaaaattcaagacaaggagggtatcccacctgaccagcagcgtctgatatttgccggcaaacagctggaggatggccgcactctctcagactacaacatccagaaagagtccaccctgcacctggtgttgcgcctgcgaggtggcattattgagccttctctccgccagcttgcccagaaatacaactgcgacaagatgatctgccgcaagtgctatgctcgccttcaccctcgtgctgtcaactgccgcaagaagaagtgtggtcacaccaacaacctgcgtcccaagaagaaggtcaaataaggtggttctttccttgaagggcagcctcctgcccaggccccgtggccctggagcctcaataaagtgtccctttcattgactggagcagcaattggtgtcctcatggctgatctgtccagggaggtggctgaagagtgggcatctcccttagggactctactcagcactccattctgtgccacctgtggggtcttctgtcctagattctgtcacatcggcattggtccctgccctatgcccctgactctggatttgtcatctgtaaaactggagtaaaaacctcagtcgtgtaattggtgggactgaggatcagttttgtcattgctgggatcctgtcaggcactttgaggtgtccctcaggccttggccctgaagtgtctaggtgtgtggagatgggtagaaaattaggtacacccaatggtgtagaacgttgattctcaaatttttttattttatacaaatggggtctcactatgttgtccaggctggtcttgaactcctgggctcaagccatccgcccatctcagcccctcaaagtgttgggattacaagcaagaactgccatgcctgacccagttctcagttttttgtttgtttgtttgtttgtttgttttgagacggagtcttgctctgtcgcccaggctggagtgcagtggcgcagtctcggcttactacaacctctgcctccggggttcacatccttctcctgcctcagcctcccgagtagctgggactacaggtgcccgccacaactcctggctaattttttgtatttttagtagagacggggtttcactgggttagccaggttggtctcgatctcctgaccttgtgatccattcgccttggcctcccagaatgctggtattacaggcgtgagccagcacgcctggcccagttactcagttttgaatctgaggccgtgacatcactcatggtctgcagtcagtgctctgcccctgagctgtaccctctcctatgataatcactcttaagaagggcaacccttggtgttttccccttaaggtcacccaggctggaatgcagtggtgtggtcatggctccctgtaccctggaactcaggcttgggtgatcctctctcctttgcctccgaagtagccaggactacaggtgtgcacccaccaccacactcagataattgctttggtgtttttaaagcttgtaatgatcagtaggctgaggtgggcaaatcataaggtcaagagttttttagatggggtgagcacagaccaattcctgttttatttactgatttaaaattttgagacagtctcactgtcacccaggttggggtgcagtggtaggatcatagcttgctgcagccttgatctcccaggatcttgcctcagcctcccgagtagctgggactgcatgcttgtgccaccacactcggttaatattttgtagagatggggtcttgctatgttgcccaggctggcttcaaactcctgaacttaaaagcctcctgtttagttttggttttttatcactttttttttttttttttgagatggagccttgctcccatcgtgcaggctggagtgcggtggcgcagtctcggctcactgcagcttctgcctctcgggttcaagcgattctcctttctcagcctcttgagtagctggaattaccagtgtgcgccaccaccaccacgcctggctagtttttctgtttttagtagagacagggttttgctatgttggccaggctggtcttgaactactgacctcttgtgatctacctgtcttggccttccaaagtgctaggattacaagcgtaagccacagcgcctggccttgctacatttttttttttttttttttttttacagacatggtctcgctatgttgcccagaatggttttgcactgggtccaagcagttctgccgcagcctcccaaagtgctgggattacaggggtgaggcaccttgctggcccctgttttgattagggtgcagtgctggtgaagccggtgcacgaggccagtgatgcatcctaatgaggggtggagttggcgggacttcctgggccagtttggggactttcacaaaagacccccatgactcagggttttgagttcttaactgatcgaatgaaggattcaaaattaaccactccaaggggggattgaaggaagaaccactcttaatggacaaaaagaaagaaaggggagggagtaacagggatatgagctctagccgcccaagctagcaatggcaacccttctgggtccccttccagcatgtggaagctttcctttcgcttcattcaataaacagctgctgctcaaaaaaaaaaaaa

SEQ ID NO: 2369 - DNA, 2602 bp, Homo sapiens
gagccgcggctaaggaacgcgggccgcccacccgctcccggtgcagcggcctccgcgccgggttttggcgcctcccgcgggcgcccccctcctcacggcgagcgctgccacgtcagacgaagggcgcagcgagcgtcctgatccttccgcccggacgctcaggacagcggcccgctgctcataagactcggccttagaaccccagtatcagcagaaggacattttaggacgggacttgggtgactctagggcactggttttctttccagagagcggaacaggcgaggaaaagtagtcccttctcggcgattctgcggagggatctccgtggggcggtgaacgccgatgattatataaggacgcgccgggtgtggcacagctagttccgtcgcagccgggatttgggtcgcagttcttgtttgtggatcgctgtgatcgtcacttgacaatgcagatcttcgtgaagactctgactggtaagaccatcaccctcgaggttgagcccagtgacaccatcgagaatgtcaaggcaaagatccaagataaggaaggcatccctcctgaccagcagaggctgatctttgctggaaaacagctggaagatgggcgcaccctgtctgactacaacatccagaaagagtccaccctgcacctggtgctccgtctcagaggtgggatgcaaatcttcgtgaagacactcactggcaagaccatcacccttgaggtcgagcccagtgacaccatcgagaacgtcaaagcaaagatccaggacaaggaaggcattcctcctgaccagcagaggttgatctttgccggaaagcagctggaagatgggcgcaccctgtctgactacaacatccagaaagagtctaccctgcacctggtgctccgtctcagaggtgggatgcagatcttcgtgaagaccctgactggtaagaccatcaccctcgaggtggagcccagtgacaccatcgagaatgtcaaggcaaagatccaagataaggaaggcattccttctgatcagcagaggttgatctttgccggaaaacagctggaagatggtcgtaccctgtctgactacaacatccagaaagagtccaccttgcacctggtactccgtctcagaggtgggatgcaaatcttcgtgaagacactcactggcaagaccatcacccttgaggtcgagcccagtgacactatcgagaacgtcaaagcaaagatccaagacaaggaaggcattcctcctgaccagcagaggttgatctttgccggaaagcagctggaagatgggcgcaccctgtctgactacaacatccagaaagagtctaccctgcacctggtgctccgtctcagaggtgggatgcagatcttcgtgaagaccctgactggtaagaccatcactctcgaagtggagccgagtgacaccattgagaatgtcaaggcaaagatccaagacaaggaaggcatccctcctgaccagcagaggttgatctttgccggaaaacagctggaagatggtcgtaccctgtctgactacaacatccagaaagagtccaccttgcacctggtgctccgtctcagaggtgggatgcagatcttcgtgaagaccctgactggtaagaccatcactctcgaggtggagccgagtgacaccattgagaatgtcaaggcaaagatccaagacaaggaaggcatccctcctgaccagcagaggttgatctttgctgggaaacagctggaagatggacgcaccctgtctgactacaacatccagaaagagtccaccctgcacctggtgctccgtcttagaggtgggatgcagatcttcgtgaagaccctgactggtaagaccatcactctcgaagtggagccgagtgacaccattgagaatgtcaaggcaaagatccaagacaaggaaggcatccctcctgaccagcagaggttgatctttgctgggaaacagctggaagatggacgcaccctgtctgactacaacatccagaaagagtccaccctgcacctggtgctccgtcttagaggtgggatgcagatcttcgtgaagaccctgactggtaagaccatcactctcgaagtggagccgagtgacaccattgagaatgtcaaggcaaagatccaagacaaggaaggcatccctcctgaccagcagaggttgatctttgctgggaaacagctggaagatggacgcaccctgtctgactacaacatccagaaagagtccaccctgcacctggtgctccgtctcagaggtgggatgcaaatcttcgtgaagaccctgactggtaagaccatcaccctcgaggtggagcccagtgacaccatcgagaatgtcaaggcaaagatccaagataaggaaggcatccctcctgatcagcagaggttgatctttgctgggaaacagctggaagatggacgcaccctgtctgactacaacatccagaaagagtccactctgcacttggtcctgcgcttgagggggggtgtctaagtttccccttttaaggtttcaacaaatttcattgcactttcctttcaataaagttgttgcattcccaaaaaaaaaaaaaaaaaaaaaaaaaaaaaa

SEQ ID NO: 2370 - DNA, 1540 bp, Homo sapiens
gcgtgggtccggctttcggtgactagacggtccgcaggggacatcccgtccctggggcctccccagtctccctccccctcgcgcctgggcagctctctcccagggcttcggctcgagcctgcgacctgcacggacacccccccctcaggatctaaaatgtccactgaggcacaaagagttgatgacagtccaagcactagtggaggaagttccgatggagatcaacgtgaaagtgttcagcaagaaccagaaagagaacaagttcagcccaagaaaaaggagggaaaaatatccagcaaaaccgctgctaaattgtcaactagtgctaaaagaattcagaaggaacttgcagaaatcacattggaccctcctcccaactgtagtgctggacccaaaggagacaacatttatgaatggaggtcaactatattgggacccccaggatctgtctatgaaggaggggtgttctttcttgacattaccttttcaccagactatccgtttaaaccccctaaggttaccttccgaacaagaatctatcactgtaatattaacagccaaggtgtgatctgtctggacatcttaaaggacaactggagtccggctttaactatttctaaagttctcctctccatctgctcacttcttacagattgcaaccctgctgaccctctggtgggcagcatcgccacacagtacatgaccaacagagcagagcatgaccggatggccagacagtggaccaagcggtacgccacataggggcctgctgcctgccgccccgcgggacctgtgcaagcacattcaccaagtgcatcggtagccctgcccacccctccagacctcggttcttattttcctatttttattaaatttggaaccattttgtgatggtatgttgtccatcttcccatcccagttcttcctgccccccttcctctctcccacgctctcttttatctctcattttattcccttgttgatttctgttaacttgaaagatttgggatttttttcccacctcatcatagatgggaacttttgttttcagtgcaaacaatgttggagctgtaatagtaagagctttcttacaaagctttgtattactgtgtggttttgttttttttgttgttgtttatttgattttgatttttttttcttttatgtgatctttgggaaaacacattcagaattatatctcgtttctacttaaatgtagtgcttagggttaattttttgtactgaagtctttattggtgggtgcatgctactgggaacaagtttttgtacaaaagcttcaatcagaatcactgtgcattactgagactctgtttatcactagccttctgtccctcccgcagaagactgttggattgaacaaaataatatgtattttgatttacttaaagtgcttgtaaatttcttagggacctgccacttttgactgtggatcagttgatgtacacttgtattattaaagcactcaataaatcactgtggctgataactgcgaaaaaaaaaaaaaaaaaaaaaaaaaaaa

SEQ ID NO: 2371 - DNA, 1221 bp, Homo sapiens
gggtcctcggagctgctctggctgcgcgcggagcgggctccggagggaagtcccgagacaaagggaagcgccgccgccgccgccccgctcggtcctccacctgtccgctacgctcgccggggctgcggccgcccgagggactttgaacatgtcggggatcgccctcagcagactcgcccaggagaggaaagcatggaggaaagaccacccatttggtttcgtggctgtcccaacaaaaaatcccgatggcacgatgaacctcatgaactgggagtgcgccattccaggaaagaaagggactccgtgggaaggaggcttgtttaaactacggatgcttttcaaagatgattatccatcttcgccaccaaaatgtaaattcgaaccaccattatttcacccgaatgtgtacccttcggggacagtgtgcctgtccatcttagaggaggacaaggactggaggccagccatcacaatcaaacagatcctattaggaatacaggaacttctaaatgaaccaaatatccaagacccagctcaagcagaggcctacacgatttactgccaaaacagagtggagtacgagaaaagggtccgagcacaagccaagaagtttgcgccctcataagcagcgaccttgtggcatcgtcaaaaggaagggattggtttggcaagaacttgtttacaacatttttgcaaatctaaagttgctccatacaatgactagtcacctgggggggttgggcgggcgccatcttccattgccgccgcgggtgtgcggtctcgattcgctgaattgcccgtttccatacagggtctcttccttcggtcttttgtatttttgattgttatgtaaaactcgcttttattttaatattgatgtcagtatttcaactgctgtaaaattataaacttttatacttgggtaagtcccccaggggcgagttcctcgctctgggatgcaggcatgcttctcaccgtgcagagctgcacttggcctcagctggctgtatggaaatgcaccctccctcctgccgctcctctctagaaccttctagaacctgggctgtgctgcttttgagcctcagaccccaggtcagcatctcggttctgcgccacttcctttgtgtttatatggcgttttgtctgtgttgctgtttagagtaaataaactgtttatataaaggttttggttgcattattatcattgaaagtgagaggagg

SEQ ID NO: 2372 - DNA, 1478 bp, Homo sapiens
gggtcctcggagctgctctggctgcgcgcggagcgggctccggagggaagtcccgagacaaagggaagcgccgccgccgccgccccgctcggtcctccacctgtccgctacgctcgccggggctgcggccgcccgaggctgccctgaggatctgtgtttggtgaaaaggagccaaattcacctgcagggcaggcggctctagcagcttcagaagcctggtgccctggcgacactggacctgccttggcttctttgatcccaaccccacccccgatttctgctctgctgactggggaagtcatcgtgccacccagaacctgagtgcgggcctctcagagctccttcgtccgtgggtctgccggggactgggccttgtctccctaacgagtgccagggactttgaacatgtcggggatcgccctcagcagactcgcccaggagaggaaagcatggaggaaagaccacccatttggtttcgtggctgtcccaacaaaaaatcccgatggcacgatgaacctcatgaactgggagtgcgccattccaggaaagaaagggactccgtgggaaggaggcttgtttaaactacggatgcttttcaaagatgattatccatcttcgccaccaaaatgtaaattcgaaccaccattatttcacccgaatgtgtacccttcggggacagtgtgcctgtccatcttagaggaggacaaggactggaggccagccatcacaatcaaacagatcctattaggaatacaggaacttctaaatgaaccaaatatccaagacccagctcaagcagaggcctacacgatttactgccaaaacagagtggagtacgagaaaagggtccgagcacaagccaagaagtttgcgccctcataagcagcgaccttgtggcatcgtcaaaaggaagggattggtttggcaagaacttgtttacaacatttttgcaaatctaaagttgctccatacaatgactagtcacctgggggggttgggcgggcgccatcttccattgccgccgcgggtgtgcggtctcgattcgctgaattgcccgtttccatacagggtctcttccttcggtcttttgtatttttgattgttatgtaaaactcgcttttattttaatattgatgtcagtatttcaactgctgtaaaattataaacttttatacttgggtaagtcccccaggggcgagttcctcgctctgggatgcaggcatgcttctcaccgtgcagagctgcacttggcctcagctggctgtatggaaatgcaccctccctcctgccgctcctctctagaaccttctagaacctgggctgtgctgcttttgagcctcagaccccaggtcagcatctcggttctgcgccacttcctttgtgtttatatggcgttttgtctgtgttgctgtttagagtaaataaactgtttatataaaggttttggttgcattattatcattgaaagtgagaggagg

SEQ ID NO: 2373 - DNA, 1144 bp, Homo sapiens
cagcccgaaggggagtttacagacgctccctcacatcggggacgcggctcctttaagggcggactttgaacatgtcggggatcgccctcagcagactcgcccaggagaggaaagcatggaggaaagaccacccatttggtttcgtggctgtcccaacaaaaaatcccgatggcacgatgaacctcatgaactgggagtgcgccattccaggaaagaaagggactccgtgggaaggaggcttgtttaaactacggatgcttttcaaagatgattatccatcttcgccaccaaaatgtaaattcgaaccaccattatttcacccgaatgtgtacccttcggggacagtgtgcctgtccatcttagaggaggacaaggactggaggccagccatcacaatcaaacagatcctattaggaatacaggaacttctaaatgaaccaaatatccaagacccagctcaagcagaggcctacacgatttactgccaaaacagagtggagtacgagaaaagggtccgagcacaagccaagaagtttgcgccctcataagcagcgaccttgtggcatcgtcaaaaggaagggattggtttggcaagaacttgtttacaacatttttgcaaatctaaagttgctccatacaatgactagtcacctgggggggttgggcgggcgccatcttccattgccgccgcgggtgtgcggtctcgattcgctgaattgcccgtttccatacagggtctcttccttcggtcttttgtatttttgattgttatgtaaaactcgcttttattttaatattgatgtcagtatttcaactgctgtaaaattataaacttttatacttgggtaagtcccccaggggcgagttcctcgctctgggatgcaggcatgcttctcaccgtgcagagctgcacttggcctcagctggctgtatggaaatgcaccctccctcctgccgctcctctctagaaccttctagaacctgggctgtgctgcttttgagcctcagaccccaggtcagcatctcggttctgcgccacttcctttgtgtttatatggcgttttgtctgtgttgctgtttagagtaaataaactgtttatataaaggttttggttgcattattatcattgaaagtgagaggagg

SEQ ID NO: 2374 - DNA, 1177 bp, Homo sapiens
gacgcttcagaggatccttaggcctcagtggtctttgacccccggccccaggacctgaccccaaggaaacctccgggacctgtggctggagagggactttgaacatgtcggggatcgccctcagcagactcgcccaggagaggaaagcatggaggaaagaccacccatttggtttcgtggctgtcccaacaaaaaatcccgatggcacgatgaacctcatgaactgggagtgcgccattccaggaaagaaagggactccgtgggaaggaggcttgtttaaactacggatgcttttcaaagatgattatccatcttcgccaccaaaatgtaaattcgaaccaccattatttcacccgaatgtgtacccttcggggacagtgtgcctgtccatcttagaggaggacaaggactggaggccagccatcacaatcaaacagatcctattaggaatacaggaacttctaaatgaaccaaatatccaagacccagctcaagcagaggcctacacgatttactgccaaaacagagtggagtacgagaaaagggtccgagcacaagccaagaagtttgcgccctcataagcagcgaccttgtggcatcgtcaaaaggaagggattggtttggcaagaacttgtttacaacatttttgcaaatctaaagttgctccatacaatgactagtcacctgggggggttgggcgggcgccatcttccattgccgccgcgggtgtgcggtctcgattcgctgaattgcccgtttccatacagggtctcttccttcggtcttttgtatttttgattgttatgtaaaactcgcttttattttaatattgatgtcagtatttcaactgctgtaaaattataaacttttatacttgggtaagtcccccaggggcgagttcctcgctctgggatgcaggcatgcttctcaccgtgcagagctgcacttggcctcagctggctgtatggaaatgcaccctccctcctgccgctcctctctagaaccttctagaacctgggctgtgctgcttttgagcctcagaccccaggtcagcatctcggttctgcgccacttcctttgtgtttatatggcgttttgtctgtgttgctgtttagagtaaataaactgtttatataaaggttttggttgcattattatcattgaaagtgagaggagg

SEQ ID NO: 2375 - DNA, 2568 bp, Homo sapiens
cgcgcgcgcagtcgcgcgcgggtcgtgccgtaccaccgtcgcgggcaggctcggccacgagcgccagagccccgcgcctcccctcgcggcctgtcccaagtccctgccccgcaacagagcgtcacttccgccatccccggcagcggttggggcggggcgcacgggggagggggccaggtcggagggaagcccgcccgtgcccgagcccgcgcccgagcagggactacatttcccgaggggcctcggcggcggctgcggcgacgggcgcggcaacgtcccccggaagtggagcccgggacttccactcgtgcgtgaggcgagaggagccggagacgagaccagaggccgaactcgggttctgacaagatggccgggctgccccgcaggatcatcaaggaaacccagcgtttgctggcagaaccagttcctggcatcaaagccgaaccagatgagagcaacgcccgttattttcatgtggtcattgctggccctcaggattccccctttgagggagggacttttaaacttgaactattccttccagaagaatacccaatggcagcccctaaagtacgtttcatgaccaaaatttatcatcctaatgtagacaagttgggaagaatatgtttagatattttgaaagataagtggtccccagcactgcagatccgcacagttctgctatcgatccaggccttgttaagtgctcccaatccagatgatccattagcaaatgatgtagcggagcagtggaagaccaacgaagcccaagccatagaaacagctagagcatggactaggctatatgccatgaataatatttaaattgatacgatcatcaagtgtgcatcacttctcctgttctgccaagacttcctcctctttgtttgcatttaatggacacagtcttagaaacattacagaataaaaaagcccagacatcttcagtcctttggtgattaaatgcacattagcaaatctatgtcttgtcctgattcactgtcataaagcatgagcagaggctagaagtatcatctggattgttgtgaaacgtttaaaagcagtggcccctccctgcttttattcatttcccccatcctggtttaagtataaagcactgtgaatgaaggtagttgtcaggttagctgcaggggtgtgggtgtttttattttattttattttattttatttttgaggggggaggtagtttaattttatgggctcctttcccccttttttggtgatctaattgcattggttaaaagcagctaaccaggtctttagaatatgctctagccaagtctaactttatttagacgctgtagatggacaagcttgattgttggaaccaaaatgggaacattaaacaaacatcacagccctcactaataacattgctgtcaagtgtagattccccccttcaaaaaaagcttgtgaccattttgtatggcttgtctggaaacttctgtaaatcttatgttttagtaaaatattttttgttattctactttgcctttgtacagtttattttactgtgtttatttcattttcccaatttgacaatcgtattttaaaattgaaactgatggaacattctttcttggtcttcaccatctgacaaattgaatggcaagaggtggattttgccagtttcttttcactgatgcagatttgtgttaagatagtactgaatggagtatttataaactggccctgagcatgcataaagcatcagtatctgacctttttttaaccttctaggaatttgaaataaatgtgtttgtgttgtctgattagatgatcattggtgtcttgccacaatgtttaaaaattactgtacaggaaagtcacagcaaagatagcagttgtgactgacatgtaggactttcacagttgtgccacatttttgcctaaaatttgggttatgacatttttcttggttcttatctgaaaatttcatctgtaacctttcatgtgtgttaagaaacactgatctgatcatttgggatttgctgaggcatttgtgagtcttccttataaacctgatgagcagatctcaactatctagcttgtgtgtcatcagaaaggtttatccctttgagagtatcaagtcctcagttaatgattcttgctttcatccctccagtatttgctgtgggagctcgttttattctttaatttggaattcagtaatttttcttctttattgacgaattcctcccctcacaaaactgttctttcccacctctctccatatctaattcctgattcttgttatttttaagtcataaatgtagccagtcataaatacataaatgttaaccttcgggttgcaaccttgtctcttgcagtttaaggtaatggatattgtagcccatttgaattttcttcactcttattctcgtaattctggagtttcttcagattgtggtgtattttattgtgctcctatgtaagatgaagaattaactattaaaattacattttcaacatacaaaagcttttgatgactggtaactggtatccttccaaataaatgcattgcttggtaaaaaaaaaaaaaaaaaa

SEQ ID NO: 2376 - DNA, 2388 bp, Homo sapiens
atcacacggcacgacttcatcgagaccaacggggacaactgcctggtgacactgctgccgctgctaaacatggcctacaagttccgcacccacagccctgaagccctggagcagctatacccctgggagtgcttcgtcttctgcctgatcatcttcggcaccttcaccaaccagatccacaagtggtcgcacacgtactttgggctgccacgctgggtcaccctcctgcaggactggcatgtcatcctgccacgtaaacaccatcgcatccaccacgtctcaccccacgagacctacttctgcatcaccacaggagtaaaagtccctcgcaatttccgactgttggaagaactcgaagaaggccagaaaggagtaggagatggcacagttagctggggtctagaagatgacgaagacatgacacttacaagatggacagggatgataattgggcctccaagaacaatttatgaaaaccgaatatacagccttaaaatagaatgtggacctaaatacccagaagcacccccctttgtaagatttgtaacaaaaattaatatgaatggagtaaatagttctaatggagtggtggacccaagagccatatcagtgctagcaaaatggcagaattcatatagcatcaaagttgtcctgcaagagcttcggcgcctaatgatgtctaaagaaaatatgaaactccctcagccgcccgaaggacagtgttacagcaattaatcaaaaagaaaaaccacaggcccttccccttccccccaattcgatttaatcagtcttcattttccacagtagtaaattttctagatacgtcttgtagacctcaaagtaccggaaaggaagctcccattcaaaggaaatttatcttaagatactgtaaatgatactaattttttgtccatttgaaatatataagttgtgctataacaaatcatcctgtcaagtgtaaccactgtccacgtagttgaacttctgggatcaagaaagtctatttaaattgattcccatcataactggtggggcacatctaactcaactgtgaaaagacacatcacacaatcaccttgctgctgattacacggcctggggtctctgccttctccccttaccctcccgcctcccaccctccctgcaacaacagccctctagcctggggggcttgttagagtagatgtgaaggtttcaggtcgcagcctgtgggactactgctaggtgtgtggggtgtttcgcctgcacccctggtttctttaagtcttaagtgatgccccttccaaaccatcatcctgtccccacgctcctccactcccgcccttggccgaagcatagattgtaacccctccactcccctctgagattggccttcggtgaggaattcagggctttccccatatcttctctcccccacctttatcgaggggtgctgctttttctccctcctcctcaagttcctttttgcaccgtcaccacccaacaccttccatgacacttccttgctttggccagaagccatcaggtaaggttggaaagagcctctgacctcccttgtttagttttggaaccatactcactcactctccaccagcctgggaaatgaatattgggtcctcagccctgccaccctctgctgtcatcagctgatgcattgtttttagctcaggttttgataaggtgaaaagaatagtcaccagggttactcagacctgccagctctcggagtccttggtggttgaacttggagaaagaccgcatgaagatacttgtaagcacacatgatccctctgaattgttttactttcctgtaactgcttttgcttttaaaaattgaagaagttttaaacagggctttcatttggtcatccttgcaatccattggggtctagtttggaatctgacaactggaacaaaaagaaccttgaatccggtgcatgccttggttttggtgctgctgctgcttcccaagatcctcagcagggattaagaaggaacccggtgtgcacagcagatccccgaaattggtgggcttgacctcctggcaaattgctgcgtctttccacttgctgttcaggaccactaaatgctgaaatgtggatgcataccgaaataaaagcaattcattgtgtactaaaggttttttttttttttttaatttagtatttgtgtaaaaccaccttttgaagcagcaactatcaagtctgaaaagcaattgatgtttccattaatctttttctggggggaaaaccttagttctaaggatttaacatcctgtaagtgaagtttaacataacagtattccataagcagcctttttattgtcagaccattgcctgattttaatataataaaaaaaaagtgtgcgttaatatttaaaaaaaaaaa

SEQ ID NO: 2377 - DNA, 2852 bp, Homo sapiens
attgggcggcgtgatctcgccgcggttccgcggccctgccgccgccgccgccagcagagcgcaccgggccgatcgggcgagtggccatggcgggcgccgaggactggccgggccagcagctggagctggacgaggacgaggcgtcttgttgccgctggggcgcgcagcacgccggggcccgcgagctggctgcgctctactcgccaggcaagcgcctccaggagtggtgctctgtgatcctgtgcttcagcctcatcgcccacaacctggtccatctcctgctgctggcccgctgggaggacacacccctcgtcatactcggtgttgttgcaggggctctcattgctgacttcttgtctggcctggtacactggggtgctgacacatggggctctgtggagctgcccattgtggggaaggctttcatccgacccttccgggagcaccacattgacccgacagctatcacacggcacgacttcatcgagaccaacggggacaactgcctggtgacactgctgccgctgctaaacatggcctacaagttccgcacccacagccctgaagccctggagcagctatacccctgggagtgcttcgtcttctgcctgatcatcttcggcaccttcaccaaccagatccacaagtggtcgcacacgtactttgggctgccacgctgggtcaccctcctgcaggactggcatgtcatcctgccacgtaaacaccatcgcatccaccacgtctcaccccacgagacctacttctgcatcaccacaggagtaaaagtccctcgcaatttccgactgttggaagaactcgaagaaggccagaaaggagtaggagatggcacagttagctggggtctagaagatgacgaagacatgacacttacaagatggacagggatgataattgggcctccaagaacaatttatgaaaaccgaatatacagccttaaaatagaatgtggacctaaatacccagaagcacccccctttgtaagatttgtaacaaaaattaatatgaatggagtaaatagttctaatggagtggtggacccaagagccatatcagtgctagcaaaatggcagaattcatatagcatcaaagttgtcctgcaagagcttcggcgcctaatgatgtctaaagaaaatatgaaactccctcagccgcccgaaggacagtgttacagcaattaatcaaaaagaaaaaccacaggcccttccccttccccccaattcgatttaatcagtcttcattttccacagtagtaaattttctagatacgtcttgtagacctcaaagtaccggaaaggaagctcccattcaaaggaaatttatcttaagatactgtaaatgatactaattttttgtccatttgaaatatataagttgtgctataacaaatcatcctgtcaagtgtaaccactgtccacgtagttgaacttctgggatcaagaaagtctatttaaattgattcccatcataactggtggggcacatctaactcaactgtgaaaagacacatcacacaatcaccttgctgctgattacacggcctggggtctctgccttctccccttaccctcccgcctcccaccctccctgcaacaacagccctctagcctggggggcttgttagagtagatgtgaaggtttcaggtcgcagcctgtgggactactgctaggtgtgtggggtgtttcgcctgcacccctggtttctttaagtcttaagtgatgccccttccaaaccatcatcctgtccccacgctcctccactcccgcccttggccgaagcatagattgtaacccctccactcccctctgagattggccttcggtgaggaattcagggctttccccatatcttctctcccccacctttatcgaggggtgctgctttttctccctcctcctcaagttcctttttgcaccgtcaccacccaacaccttccatgacacttccttgctttggccagaagccatcaggtaaggttggaaagagcctctgacctcccttgtttagttttggaaccatactcactcactctccaccagcctgggaaatgaatattgggtcctcagccctgccaccctctgctgtcatcagctgatgcattgtttttagctcaggttttgataaggtgaaaagaatagtcaccagggttactcagacctgccagctctcggagtccttggtggttgaacttggagaaagaccgcatgaagatacttgtaagcacacatgatccctctgaattgttttactttcctgtaactgcttttgcttttaaaaattgaagaagttttaaacagggctttcatttggtcatccttgcaatccattggggtctagtttggaatctgacaactggaacaaaaagaaccttgaatccggtgcatgccttggttttggtgctgctgctgcttcccaagatcctcagcagggattaagaaggaacccggtgtgcacagcagatccccgaaattggtgggcttgacctcctggcaaattgctgcgtctttccacttgctgttcaggaccactaaatgctgaaatgtggatgcataccgaaataaaagcaattcattgtgtactaaaggttttttttttttttttaatttagtatttgtgtaaaaccaccttttgaagcagcaactatcaagtctgaaaagcaattgatgtttccattaatctttttctggggggaaaaccttagttctaaggatttaacatcctgtaagtgaagtttaacataacagtattccataagcagcctttttattgtcagaccattgcctgattttaatataataaaaaaaaagtgtgcgttaatatttaaaaaaaaaaa

SEQ ID NO: 2378 - DNA, 2539 bp, Homo sapiens
cccgcctaacctcttcctgcgatgagctcggcacgggaattattattgtcaattttacttgcaagaagtttcctacaagagccaaggaatccatgcgagtaaacatttacgggcaccatagataaaaggcttgtgttttaatcctcatcctctccacctgttagctctgagtctcagttttctcatctctaaaaatggggatattcacaggagttgctgcatcgagttgtgaggattaaaagttggatgtaacggcttggtaattatgagctcttctagtgtcccttcctcttccctgtgcccaaggggttttaggaaagcattttatctccacagcaatcctatgaggttgatactactatcctcatagaaggggaaactgatgccaggagaggttcaagcgtcttacctgaagtcacaaagcaaactgagtgatgaaggaagacttgaacctagaaaatttcactgcaaaggagtaaaagtccctcgcaatttccgactgttggaagaactcgaagaaggccagaaaggagtaggagatggcacagttagctggggtctagaagatgacgaagacatgacacttacaagatggacagggatgataattgggcctccaagaacaatttatgaaaaccgaatatacagccttaaaatagaatgtggacctaaatacccagaagcacccccctttgtaagatttgtaacaaaaattaatatgaatggagtaaatagttctaatggagtggtggacccaagagccatatcagtgctagcaaaatggcagaattcatatagcatcaaagttgtcctgcaagagcttcggcgcctaatgatgtctaaagaaaatatgaaactccctcagccgcccgaaggacagtgttacagcaattaatcaaaaagaaaaaccacaggcccttccccttccccccaattcgatttaatcagtcttcattttccacagtagtaaattttctagatacgtcttgtagacctcaaagtaccggaaaggaagctcccattcaaaggaaatttatcttaagatactgtaaatgatactaattttttgtccatttgaaatatataagttgtgctataacaaatcatcctgtcaagtgtaaccactgtccacgtagttgaacttctgggatcaagaaagtctatttaaattgattcccatcataactggtggggcacatctaactcaactgtgaaaagacacatcacacaatcaccttgctgctgattacacggcctggggtctctgccttctccccttaccctcccgcctcccaccctccctgcaacaacagccctctagcctggggggcttgttagagtagatgtgaaggtttcaggtcgcagcctgtgggactactgctaggtgtgtggggtgtttcgcctgcacccctggtttctttaagtcttaagtgatgccccttccaaaccatcatcctgtccccacgctcctccactcccgcccttggccgaagcatagattgtaacccctccactcccctctgagattggccttcggtgaggaattcagggctttccccatatcttctctcccccacctttatcgaggggtgctgctttttctccctcctcctcaagttcctttttgcaccgtcaccacccaacaccttccatgacacttccttgctttggccagaagccatcaggtaaggttggaaagagcctctgacctcccttgtttagttttggaaccatactcactcactctccaccagcctgggaaatgaatattgggtcctcagccctgccaccctctgctgtcatcagctgatgcattgtttttagctcaggttttgataaggtgaaaagaatagtcaccagggttactcagacctgccagctctcggagtccttggtggttgaacttggagaaagaccgcatgaagatacttgtaagcacacatgatccctctgaattgttttactttcctgtaactgcttttgcttttaaaaattgaagaagttttaaacagggctttcatttggtcatccttgcaatccattggggtctagtttggaatctgacaactggaacaaaaagaaccttgaatccggtgcatgccttggttttggtgctgctgctgcttcccaagatcctcagcagggattaagaaggaacccggtgtgcacagcagatccccgaaattggtgggcttgacctcctggcaaattgctgcgtctttccacttgctgttcaggaccactaaatgctgaaatgtggatgcataccgaaataaaagcaattcattgtgtactaaaggttttttttttttttttaatttagtatttgtgtaaaaccaccttttgaagcagcaactatcaagtctgaaaagcaattgatgtttccattaatctttttctggggggaaaaccttagttctaaggatttaacatcctgtaagtgaagtttaacataacagtattccataagcagcctttttattgtcagaccattgcctgattttaatataataaaaaaaaagtgtgcgttaatatttaa

SEQ ID NO: 2379 - DNA, 2187 bp, Homo sapiens
attgggcggcgtgatctcgccgcggttccgcggccctgccgccgccgccgccagcagagcgcaccgggccgatcgggcgagtggccatggcgggcgccgaggactggccgggccagcagctggagctggacgaggacgaggcgtcttgttgccgctggggcgcgcagcacgccggggcccgcgagctggctgcgctctactcgccaggcaagcgcctccaggagtggtgctctgtgatcctgtgcttcagcctcatcgcccacaacctggtccatctcctgctgctggcccgctgggaggacacacccctcgtcatactcggtgttgttgcaggggctctcattgctgacttcttgtctggcctggtacactggggtgctgacacatggggctctgtggagctgcccattgtggggaaggctttcatccgacccttccgggagcaccacattgacccgacagctatcacacggcacgacttcatcgagaccaacggggacaactgcctggtgacactgctgccgctgctaaacatggcctacaagttccgcacccacagccctgaagccctggagcagctatacccctgggagtgcttcgtcttctgcctgatcatcttcggcaccttcaccaaccagatccacaagtggtcgcacacgtactttgggctgccacgctgggtcaccctcctgcaggactggcatgtcatcctgccacgtaaacaccatcgcatccaccacgtctcaccccacgagacctacttctgcatcaccacaggctggctcaactaccctctggagaagataggcttctggcgacgcctggaggacctcatccagggcctgacgggcgagaagcctcgggcagatgacatgaaatgggcccagaagatcaaataacttctccgagcctgctacctggttgccaaccttccctagcccccaaaccgaagccatctgccaaattccagcctctttgagctggcccctccagatggagaggacatctcctgggctgggcccaggtaccccagcccacccctcatgacacagaatacttgagccactgatttttcatttcttttttttttttttcctcggcccctcctcagccacctgagttgctctatctgcaagcctgactctgccagcctcccctggtagagaggaggtttacccactccctgcacgcctgccgtccctgccccgctgggcagcccttcagtgtggctggcgttggggccagtgagttgcctctttccctccttgtctggccccagtggtctggggagcccccaggcacacctaagcgtcgtggagcattgttctgccacagccctgcatactgaccccgggaggctgggcaggtggacagccccagccaccaccttcagcctagcctgtcccccaaggatggtgaagctcagcaggggtctgagggtagccggccagaagaggctggaacctcctgctcaagtctagacccctacttctctgctgcccccaccctgccagagctgatgtttccaataccaagatgtcttcacagggcacagcccctgcagagcatcttggtcatttggaagaggacacggtatcccctctggccagagtatgtcagagaaggaagagtagggcttttttgttttgtttttttttaaaggtgcttgcttgtttaatgtaaataatagaaagccttaatatcttttctgtaacacggagtaatattttaatgtcatgttttggatgtacataatatatttataacaaagcagcaagagtctacttaaccttggctgcctcgtggtgtttcctggctgggtggggtggggggtatcaaggagcctgggacgtgaggccccactctcgccccattcccagctccccccaaccctggcctcaggatgagagctgtcacctgagacagtgaattaatgttgacatctgctccaaagccttttggaggggattgggtgaggacagtggtctttcctgttgatcatgatgataaagtaatgatggctgatccctatttgtgacttccttcagcaaatattcactggcacctggtgtgtgccaggctctgtcctgtacacaggtacagcggtgaaagaaccaacaaagacctatcctggtggagctgacctcctgggaaaagagtcaataaacaaataaatgcacatggaaa

SEQ ID NO: 2380 - DNA, 5404 bp, Homo sapiens
gaacaccgcggggcaagatggcggtagtgcgtcggctgctgccccgggtctggcagaactcgggtgttttgggctgagacagtggcagctgcggccccgaccccaagtgcggggacctccggcgaataaagaaaaaataacaagcttttctgaagtgagaagctgttctcagccacgagtcctgtgcaagatcactaatgattacctggcatttctgcgacacaggcaggtcctcagggtttgtgcaagtttgcaaacatgttcaccctgtctcagacctcgagagcatggttcatcgatagagcccgtcaggcacgagaagaaaggcttgtgcagaaggaacgggagcgggcagctgttgtgatccaggcccatgtccggagttttctctgtcggagtcgactgcagagagatatcaggagagagattgatgacttttttaaagcagatgaccctgagtccactaaaagaagtgcactttgtattttcaagattgccaggaaactgctgttcctattcagaatcaaagaggataatgagagatttgagaagttgtgtcgcagcatcctgagcagcatggatgctgagaatgagcctaaggtgtggtatgtgtccctggcttgttctaaggacctcaccctcctttggattcaacagatcaagaacattttgtggtactgctgtgattttctcaagcagctcaagcctgaaatcctgcaggactcccgactcatcaccctgtacctcacgatgcttgtcaccttcacagacacttcaacgtggaaaattcttcggggaaaaggtgaaagtcttcgaccagcgatgaaccacatttgtgcaaatataatgggacatctcaaccagcatggattttattctgtgctgcagatattgttaacccgtggcctggcaagaccccgtccttgtctatccaaaggcactttaacagcagctttttctctagcgttacgccctgtgattgctgcacagttctcagacaatctgattcggccgttcctcatccacatcatgtctgtgcctgctctggtgactcatctcagcacagtgacccctgagcgcctcactgttttagaatcccatgacatgcttcgtaaattcatcatatttttaagagaccaagatcgatgccgtgatgtatgtgaaagtttagaaggatgccatacgctttgtctaatgggcaacctcctacacttgggctccctcagccccagagtgttagaggaggagacagatgggttcgtgagtttgctcacccagacgctgtgctactgtcggaagtatgtgtctcagaagaagtccaacctgacccactggcatcctgtccttggctggttctcccaatctgtggattatggccttaacgagtcaatgcacttgatcaccaaacagctgcagttcttgtggggggtgcctctgatccggatcttcttctgtgacatcctgagcaagaagctactggagagccaggagccagcccacgcacagccagcatcccctcagaatgtgctcccagtgaagagtctcctaaagcgtgcttttcaaaagtcggcatcagtccggaatattctcaggcctgtcgggggtaaacgggtcgactctgcagaagtccagaaggtttgcaacatctgtgtcctctaccagacctcgctgacaactctcacacagattcggctgcagatactcacaggtctcacttaccttgatgacctgcttcccaaactgtgggcatttatctgtgagctcgggccccacggagggttaaagctcttcttggaatgcctgaacaatgacactgaagagtccaagcaactcttggccatgctgatgctgttctgtgactgttcgcggcacctcatcacaatccttgatgacattgaagtttatgaagaacagatttcattcaaactggaagagctggtcactatctcctctttcctgaattcttttgtgtttaagatgatctgggatggaattgtagagaacgccaagggtgagaccttggagctgttccagtctgtccacgggtggcttatggtgctgtacgagcgggactgccggcggcgcttcacccccgaggaccactggctgcgaaaggatctcaaacctagcgtgctcttccaagaactcgacagggacagaaaacgggcacagttgatcctgcagtacatcccacatgtcatccctcacaaaaacagagttctactgtttcgaaccatggttaccaaggagaaggagaaactggggctggtggaaaccagctctgcctccccgcatgtcactcacatcaccatccgccggtccaggatgctggaggacggctacgagcagcttaggcagctctcccagcacgccatgaagggggtcatccgtgtgaagtttgtcaatgacctcggggtggacgaagcagggattgatcaagacggtgtttttaaggagttcttggaagagatcatcaagagagtttttgacccagcactcaatctgttcaagacaaccagtggggatgagaggctgtacccctcacccacatcctacatccatgagaattacctgcagctcttcgagtttgtggggaagatgctggggaaggctgtgtatgagggaattgtggtggacgtgccatttgcatccttcttcctgagccaactgcttgggcaccaccacagcgtcttctatagctcggtggatgaactgccttctctggactccgagttctataaaaacctcacctccatcaagcgctatgatggggacatcactgacctgggcctgacgctgtcttacgacgaggacgtcatgggtcagcttgtttgccatgaactgattcctggagggaagaccattcctgttacaaatgaaaataaaattagctacatccatctgatggcacattttcgaatgcacactcaaataaaaaaccaaacagctgccctcattagcggattccgttccattatcaaacccgagtggatccgaatgttctcaactcctgaactgcagcgtctcatctctggcgacaatgctgagattgatctggaagatttaaagaagcacacagtctactacggtggtttccatggaagtcacagagtcatcatctggctctgggatattctggcctccgacttcacaccggatgagagagctatgtttctgaagttcgtgaccagctgctccagacccccgctcctgggattcgcctacctcaagcctccattctccatccgctgcgtggaggtgtcggacgatcaggacaccggggacactctgggcagcgtcctccggggcttcttcaccatccgcaagcgggagccaggcggccgcctgcccacctcctccacctgcttcaacctgctcaagctgcccaactacagcaagaagagcgtcctccgcgagaagctgcgctacgccatcagcatgaacacgggctttgaactctcctagctcctgtcccagccctgcctccagggctcctgggctgccagggaccttcagctcccagaggcagtgtggtcctgggaatgtgaccaacatgccaggtgacattggcccctagaccctctctatagccatgagactccttgtggcctcaagaaatttagacgcccacgacagcactacacagcatctccaggtgatgcccaaggcacagggctgcagaaaataaacctccagattccaccaacacgggtccattcttcctggtgatggcagaggggcttcttttagctagtttgatcttttgggagtctgtctttccttagccgtctgagtgagctgtgtatgaacaagtcccaggagttccaagagtctagagtggtttttgcagcatgggttgagtgtacaaagcctactgtgcgtgagatcctctccttccgtttctgaaatctcttactcaggtaaggcctcgccaagcctctatgcaccccacaaagtttctgcctccatgccgtccacagcgcctcttcccagacagccaggcccatctgctgcccagggaagcgcaggcgcctgctagggacgctatggacaccgtgagtccaaggcgctgctcctgccttgaagccacgcgctccacgccgcggccctcccattttctgcgtcctcagcgggctgagctgccagagagtcttcccggacctattcccgtcctatgcattcacattggcatcctggtttgggggaagaaaaacaacggcccttagcagcagccccgtttccagaatgtgctgcctgttccccaaagcctgcttgtcccgcggaggacggctgcctttgaccctgcttatttgtctcactggttatctaatgaggaacaaacactaacctaaggtacacatcccatctgggcggtggcttcactcctgagtctgcaaaatcccaggaaacttgggtcttgctgcccatccttcctcagcacagggaacccggaagcccgttgcactgacagaggctcacaccctctgggttttttgttttttttttaaacttcatttctcttccaacccattgtgttcctctgccctcattctttacctttgttgtaagaactttagctccagggaactgaggcagaggccctgtttgtggtctgtgttgacagccacccaccctctcccacctcatgctcctgcacctgcaccaccaaggttgatgccggattcgaagccaggaaggcccagtccctcctctgctctcctcaaagacgcaaaacattttccaacaagagctgtcacagtggcagcaaagcaggggccacccgtctccacagtccttcagagtttcagctgcatcctggtgtcccacccaggtcgagcccccaggcttctggaaaagagtgtgtgctctactttgatggaaacatggcaaggaatttaaagacaggaatgtattaatattattgaaggtgtgttcgtaacctctgattctgtggacttgccactttctccaaacgctcggttcctttgaagatttcttctgaacgtgtgtgcgcacgctgggcgggttcgtgcatacatgcggggaccccagactgtcagcacagggaagatggatcccatcctaatttttatcacctgaaggttggaaccagtgagggactgggagagagtgatttataagcaccaatatcaacttcatgtggatttttgacaaggaggggtagtttgtaatttcatttaaattcttttcagcagctggaaatattgcactatctgaaacactgaatctccttttgtaactggtgttcactgacaccttgatggctcttgatggctctaaaaagttgtaggattttttgtttttgtagctaacttatggattgagatgtgatcaaaggctttattaaatttgtacttcagcataaaaaaaaaaaaaaaaaaaa

SEQ ID NO: 2381 - DNA, 5857 bp, Homo sapiens
gaacaccgcggggcaagatggcggtagtgcgtcggctgctgccccgggtctggcagaactcgggtgttttgggctgagacagtggcagctgcggccccgaccccaagtgcggggacctccggcgaataaaggtcggcctgcgggtaggccggtagggcctgcggtccggcctgcgggagaactgggtcgtcagtcctccgagtggtggggctggggactttgagggagttggctctagggcacagtccctgcctggccaggtcggaggaacaagtgctgggatctggcgtgtgtgctccaggggctctttccgcggccctttccacctcttttcactttggggacggtaggcctttataaacggactaatgctgggtgatttgttcctgtggttgttgatgccgaggaaagactctgggccccaggactcacctaaactggagttcgaatactgttcgctcgctgtgtgaccttggaaaaaataacaagcttttctgaagtgagaagctgttctcagccacgagtcctgtgcaagatcactaatgattacctggcatttctgcgacacaggcaggtcctcagggtttgtgcaagtttgcaaacatgttcaccctgtctcagacctcgagagcatggttcatcgatagagcccgtcaggcacgagaagaaaggcttgtgcagaaggaacgggagcgggcagctgttgtgatccaggcccatgtccggagttttctctgtcggagtcgactgcagagagatatcaggagagagattgatgacttttttaaagcagatgaccctgagtccactaaaagaagtgcactttgtattttcaagattgccaggaaactgctgttcctattcagaatcaaagaggataatgagagatttgagaagttgtgtcgcagcatcctgagcagcatggatgctgagaatgagcctaaggtgtggtatgtgtccctggcttgttctaaggacctcaccctcctttggattcaacagatcaagaacattttgtggtactgctgtgattttctcaagcagctcaagcctgaaatcctgcaggactcccgactcatcaccctgtacctcacgatgcttgtcaccttcacagacacttcaacgtggaaaattcttcggggaaaaggtgaaagtcttcgaccagcgatgaaccacatttgtgcaaatataatgggacatctcaaccagcatggattttattctgtgctgcagatattgttaacccgtggcctggcaagaccccgtccttgtctatccaaaggcactttaacagcagctttttctctagcgttacgccctgtgattgctgcacagttctcagacaatctgattcggccgttcctcatccacatcatgtctgtgcctgctctggtgactcatctcagcacagtgacccctgagcgcctcactgttttagaatcccatgacatgcttcgtaaattcatcatatttttaagagaccaagatcgatgccgtgatgtatgtgaaagtttagaaggatgccatacgctttgtctaatgggcaacctcctacacttgggctccctcagccccagagtgttagaggaggagacagatgggttcgtgagtttgctcacccagacgctgtgctactgtcggaagtatgtgtctcagaagaagtccaacctgacccactggcatcctgtccttggctggttctcccaatctgtggattatggccttaacgagtcaatgcacttgatcaccaaacagctgcagttcttgtggggggtgcctctgatccggatcttcttctgtgacatcctgagcaagaagctactggagagccaggagccagcccacgcacagccagcatcccctcagaatgtgctcccagtgaagagtctcctaaagcgtgcttttcaaaagtcggcatcagtccggaatattctcaggcctgtcgggggtaaacgggtcgactctgcagaagtccagaaggtttgcaacatctgtgtcctctaccagacctcgctgacaactctcacacagattcggctgcagatactcacaggtctcacttaccttgatgacctgcttcccaaactgtgggcatttatctgtgagctcgggccccacggagggttaaagctcttcttggaatgcctgaacaatgacactgaagagtccaagcaactcttggccatgctgatgctgttctgtgactgttcgcggcacctcatcacaatccttgatgacattgaagtttatgaagaacagatttcattcaaactggaagagctggtcactatctcctctttcctgaattcttttgtgtttaagatgatctgggatggaattgtagagaacgccaagggtgagaccttggagctgttccagtctgtccacgggtggcttatggtgctgtacgagcgggactgccggcggcgcttcacccccgaggaccactggctgcgaaaggatctcaaacctagcgtgctcttccaagaactcgacagggacagaaaacgggcacagttgatcctgcagtacatcccacatgtcatccctcacaaaaacagagttctactgtttcgaaccatggttaccaaggagaaggagaaactggggctggtggaaaccagctctgcctccccgcatgtcactcacatcaccatccgccggtccaggatgctggagagcttgtttgagtgcccctggccactggtgatcaatgccgagagctgctaggaaggcagtgtgtgctgaacagtggatgtttctgacattcttcaaggacggctacgagcagcttaggcagctctcccagcacgccatgaagggggtcatccgtgtgaagtttgtcaatgacctcggggtggacgaagcagggattgatcaagacggtgtttttaaggagttcttggaagagatcatcaagagagtttttgacccagcactcaatctgttcaagacaaccagtggggatgagaggctgtacccctcacccacatcctacatccatgagaattacctgcagctcttcgagtttgtggggaagatgctggggaaggctgtgtatgagggaattgtggtggacgtgccatttgcatccttcttcctgagccaactgcttgggcaccaccacagcgtcttctatagctcggtggatgaactgccttctctggactccgagttctataaaaacctcacctccatcaagcgctatgatggggacatcactgacctgggcctgacgctgtcttacgacgaggacgtcatgggtcagcttgtttgccatgaactgattcctggagggaagaccattcctgttacaaatgaaaataagcaacagaattagctacatccatctgatggcacattttcgaatgcacactcaaataaaaaaccaaacagctgccctcattagcggattccgttccattatcaaacccgagtggatccgaatgttctcaactcctgaactgcagcgtctcatctctggcgacaatgctgagattgatctggaagatttaaagaagcacacagtctactacggtggtttccatggaagtcacagagtcatcatctggctctgggatattctggcctccgacttcacaccggatgagagagctatgtttctgaagttcgtgaccagctgctccagacccccgctcctgggattcgcctacctcaagcctccattctccatccgctgcgtggaggtgtcggacgatcaggacaccggggacactctgggcagcgtcctccggggcttcttcaccatccgcaagcgggagccaggcggccgcctgcccacctcctccacctgcttcaacctgctcaagctgcccaactacagcaagaagagcgtcctccgcgagaagctgcgctacgccatcagcatgaacacgggctttgaactctcctagctcctgtcccagccctgcctccagggctcctgggctgccagggaccttcagctcccagaggcagtgtggtcctgggaatgtgaccaacatgccaggtgacattggcccctagaccctctctatagccatgagactccttgtggcctcaagaaatttagacgcccacgacagcactacacagcatctccaggtgatgcccaaggcacagggctgcagaaaataaacctccagattccaccaacacgggtccattcttcctggtgatggcagaggggcttcttttagctagtttgatcttttgggagtctgtctttccttagccgtctgagtgagctgtgtatgaacaagtcccaggagttccaagagtctagagtggtttttgcagcatgggttgagtgtacaaagcctactgtgcgtgagatcctctccttccgtttctgaaatctcttactcaggtaaggcctcgccaagcctctatgcaccccacaaagtttctgcctccatgccgtccacagcgcctcttcccagacagccaggcccatctgctgcccagggaagcgcaggcgcctgctagggacgctatggacaccgtgagtccaaggcgctgctcctgccttgaagccacgcgctccacgccgcggccctcccattttctgcgtcctcagcgggctgagctgccagagagtcttcccggacctattcccgtcctatgcattcacattggcatcctggtttgggggaagaaaaacaacggcccttagcagcagccccgtttccagaatgtgctgcctgttccccaaagcctgcttgtcccgcggaggacggctgcctttgaccctgcttatttgtctcactggttatctaatgaggaacaaacactaacctaaggtacacatcccatctgggcggtggcttcactcctgagtctgcaaaatcccaggaaacttgggtcttgctgcccatccttcctcagcacagggaacccggaagcccgttgcactgacagaggctcacaccctctgggttttttgttttttttttaaacttcatttctcttccaacccattgtgttcctctgccctcattctttacctttgttgtaagaactttagctccagggaactgaggcagaggccctgtttgtggtctgtgttgacagccacccaccctctcccacctcatgctcctgcacctgcaccaccaaggttgatgccggattcgaagccaggaaggcccagtccctcctctgctctcctcaaagacgcaaaacattttccaacaagagctgtcacagtggcagcaaagcaggggccacccgtctccacagtccttcagagtttcagctgcatcctggtgtcccacccaggtcgagcccccaggcttctggaaaagagtgtgtgctctactttgatggaaacatggcaaggaatttaaagacaggaatgtattaatattattgaaggtgtgttcgtaacctctgattctgtggacttgccactttctccaaacgctcggttcctttgaagatttcttctgaacgtgtgtgcgcacgctgggcgggttcgtgcatacatgcggggaccccagactgtcagcacagggaagatggatcccatcctaatttttatcacctgaaggttggaaccagtgagggactgggagagagtgatttataagcaccaatatcaacttcatgtggatttttgacaaggaggggtagtttgtaatttcatttaaattcttttcagcagctggaaatattgcactatctgaaacactgaatctccttttgtaactggtgttcactgacaccttgatggctcttgatggctctaaaaagttgtaggattttttgtttttgtagctaacttatggattgagatgtgatcaaaggctttattaaatttgtacttcagcataaaaaaaaaaaaaaaaaaaaaaaa

SEQ ID NO: 2382 - DNA, 6138 bp, Homo sapiens
acttccggttgctgtgctgagtcggaagtgggaacccttcggccgctgagattctgtcgtgtcgtcgctgctggcacttcaggctctgcctctcccactaggtctggatggaggataccttaaagtgaaatgacagaccaggagaataacaacaacatctcaagtaacccctttgctgctctttttggctccctggctgatgccaaacagtttgcggcaatccaaaaagagcagctgaagcaacaatctgatgaactcccagctagcccagatgactcggataatagcgtgtcagagagcctggatgaattcgattactctgtggctgagattagccgctcattccgatcacagcaggaaatatgtgagcaactcaacatcaatcacatgatccaaaggatcttccttattactctggacaacagtgatcccagcttgaaaagcgggaatggcatccctagccgttgtgtgtatttggaagaaatggcagtagagctagaagatcaagactggcttgatatgagcaatgttgagcaggccctcttcgctcgcttattacttcaagatccaggcaaccacttaattaacatgacttcttctacaacgctaaatctctctgctgatcgagatgcaggagagaggcacattttttgttacctttactcctgcttccagagagccaaggaagagattaccaaagttccagagaacctgctaccctttgcagtgcagtgcagaaacctcactgtgtccaatacccgaacagttcttctcaccccagagatctatgttgaccaaaacatccatgagcaactggtagatttgatgttagaagccatccagggagcccgtgagtacatgaacaagatctattttgaagatgtaactgagtttctggaagaggtcattgaagccttgatattggatgaggaagttagaacatttccagaagtcatgattccagtgtttgatattttattgggccgaataaaagatctagagctctgtcagatccttttgtatgcatatctggatattcttctctatttcactaggcaaaaagatatggcaaaggtttttgtagaatacattcagcccaaggaccctaccaatgggcaaatgtaccagaagaccttgctgggagtaattctgagtatctcctgcttattaaagactccgggtgttgtagaaaatcatggctactttttgaatccatctcgttccagcccccaggagatcaaagtacaggaggccaacatccatcagttcatggctcagttccacgaaaagatctaccagatgctgaagaacttactccagctctctccagaaaccaaacactgtatcttgtcctggcttggaaactgtttgcatgcaaatgcaggccgcaccaagatttgggccaatcagatgccagaaatctttttccaaatgtatgcctcagatgctttctttctgaatctgggtgctgctctcctgaagctatgccagccattttgcaaacccagatcctctcggctcctcacctttaatcccacatactgtgccctcaaggagttgaatgatgaagaacgaaaaattaaaaatgtacacatgagaggtttggacaaagaaacctgtttgatcccagctgtgcaggagccgaagtttccacagaactacaaccttgtaacagagaaccttgctctgacagagtacaccttgtacttgggatttcacaggttgcatgatcagatggtaaaaatcaaccaaaatctgcatcggctgcaggttgcctggcgggatgctcagcaaagttctagccctgctgctgacaatcttcgtgagcagtttgaacgactgatgaccatctatctttctaccaagactgccatgacagagccacaaatgctacaaaactgcctaaacttgcaggtgtccatggctgttctactggttcaactggccataggcaatgagggctcacagccaatagagctaacctttcctttgccagatggctacagctctttggcttatgtgccagaattttttgcagataacctgggtgattttctcatttttctccgccgctttgccgatgacattttggagacatcagcagattccctggagcatgtccttcactttatcaccattttcactggaagcatagaaagaatgaagaatccccacctgagggccaaactagcagaggtgttggaagcagtgatgccccacctggatcagaccccaaatcccttggtatccagtgtgttccaccggaaacgtgtgttctgcaactttcagtatgcaccccaacttgcagaggctctaatcaaggtttttgtggacatcgaatttacaggagacccccatcaatttgaacagaagtttaattaccgccgtcccatgtatcctatcctaagatacatgtgggggacagatacctatcgggagagcattaaggatttggctgactatgcctctaagaatttagaagccatgaatcccccacttttcctccgctttcttaacctgctaatgaatgatgccatcttccttttggatgaagccatacagtatttgagcaagataaagattcagcaaattgagaaggatcgaggtgaatgggatagtctgactccagaagcccgccgagaaaaggaggctggcctacagatgtttggacagctggcacgtttccataacatcatgtccaatgaaacaatcggtacccttgcctttctcacatcagagatcaagtcactctttgtgcatcccttcctggctgagcgcatcatctccatgttgaactacttcctgcaacacctggttggccccaagatgggtgccttaaaagtcaaggacttcagcgaatttgacttcaaaccccagcagcttgtatcagatatctgcactatctacttaaatcttggggatgaggagaatttctgtgccactgtgcccaaggatggacgttcctattccccaactctctttgcacagacagttcgagtcttgaagaaaataaataagcctgggaatatgattatggctttcagcaacttggcagagagaatcaagtctcttgcagacctccaacaacaggaagaggaaacctatgcagatgcctgtgatgagttcctggatcccattatgagcacactgatgtgtgaccctgtggtgctgccatcttccagagtcactgtggatagatccaccattgcaagacatttgctcagtgaccaaacagatccctttaaccgtagtcccctcaccatggaccagatccggccaaacacagaactaaaagaaaaaatccaacggtggcttgcagagaggaaacaacaaaaggagcaacttgaatagatactgtgaactaaccaaaccaaaaccaaccccagagtgcagataaacaattgtttgtggtttctctctttctggttctgttccttttctttcttcttttctttttcttttttttttttttttttactaaattagagaactgctcttgctgaaattatgatagttaagattcctaagaacttgacaatgctcccctggcttgcaggaaattatacttattatagcatcaccaagtttagaaatcatcactaattttcaccctctgttgtctcttcatattcttcttccttttcctaaatgaaattatattatttcaactactaaaacttcccgccaccctgctatttctcttccaattactgttcaaacatttttggtgagtgctgcttttataaatatgtgatgtcacatatttcagtgacagctgatgttatcagaaaaatcctgttatcctgtgtatttactagtcctcatgatctagacttaaccccttttctgtgttacagagtaacttcacataaaagcagatacctttaagtttgtgtagacttctgaataagatgatagacgagaattttttttaaaaaaggaatttaaaggaatcttgtgcaacttctgttgatagctcttaattttgttatacagtctttttaatgaggattggtagggcaatcctaccaattgatgggggtgaggagactgttgggcccttattctcttatgaaaatctgtttctacaaggactaggcctaagtagatttaggcaacgggtatcatatccatgaaaaatgtcattttaagacactaatatcaacagtatatctcagtgtgtgagatatataaatacacatacaccccatgtgcttttttgttggtttagtgtaaactgagtaccactttatattttctcttccatagtgagatgtatgcagtatgtggccatgtttactaacatactcattcttcacaaaattctgagattataaaatgtatatagttaatatttgtttgagcttgtgacctgacttctaagagctacttctaacacagccttaggtcttcaattaacaaagtaggaagttgagcacaaccttgtccacagccattttaaatatccacttagccctgtgtagttggtaggtggacaccactttcataagtgaacttgagctcactactcaattgtgcagcttaatatgctgactagggacattcccctatggattatctttatatcactgtctttctaagcccagagatgtcataagtgacaagaaaagtgataggatcaagaaatgggtgtcactgcttcatttggaacatgttattaactatggtctctttcaaataaatagtagttttatatttcaacacaagttgctataagcagtccttgatgggtttttgattgcatcagctggaaagcctcaaatctaagagggcttcccatcctagatataaaataggtgttgcctattgctgtgcttataaaatgaaaaaggaaattgaggacacttttgcaaatgccagaatgtaagattcattcagtgtgctccctgggcctttatggcatgggttgacaggatttgtttattttctaaaattagcttcattcaatatttatcatcctcctttccctctctgagaatgaactatgtataaaataagcttctgcctatttgcatttatcttccaaacccaatctagtaggatgttctcattttaaaaacgaggggaaaagaccagagtttttcaggagaaaactggaggaaaatgggcacaaaaactcagaaggcagctattcccagcagcttcctagttaacaacccccatgctgcctccagtctttgtctgtattcttctgtatttaaccttcagattgtaagccttttctggcaagcttttcttctttttttaaactcttttcctgaaactttttatgaatggctatggcaccattaatgctgctgaatatctttaaactctgcacaagcaagtgtgtagcttaaggccactactggtaaggaaaccaagtgtcctctgtgccttttttctttctgtgaagtaatttaagaatatccaaaaaaattagactttaaaaagttatcttggtacaacaccgtgtgtatatacacttggaagcttaaaaaggtgttttgtctggaacttagaagcagctctaaatctagtagagcagactttctaacatacctagttttgtgtattggctttgctggagtatgatagcaaaatgaagactcttttactcagctctggtattgctcataacttaccaagaggctaatactaaacttggaaaattgtttaagtatgttttatcaagcagtctgggttttgttttttaatatactttttaatggatatgtgaaaactgaaggaaatgttaaaggttttttaatggtgcaagtgaaggtgccagttgctatttgatatcacactctacaaaagcttcattactttatttgatggtggttgctaagcagccattgcacagagcataagtctactgggtgcctttacatgccagaggctgatgctgcactgttgatgtcatgtgaggaaataatgcacatgctctaactgctcaacaggaaatgaacctagaaacagaaaatgaaaaggttgattgaaataaaacttgatcaacgcgactgtattttgaaacattccaggaaggttacttcttgtcaaacttgcctggcagtgtttgttcaaaacttgtatttaataaatgaacatctgacttacaaaaaaaaaaaaaaaaaa

SEQ ID NO: 2383 - DNA, 4158 bp, Homo sapiens
gtcgcgttgaagccagcgtccggccggcagagcggcgtcggcggggttggccggggcggtgtggcgctagagcctgggcgggccgggggcaaggagtcaaggcttgggggcgggtgacgggcgggcggagggcttgcccccgtgtggtcctcggagcggcccgaggtccagcctcccagcggtcccggaggaggatgcgaccggggggccccgggcggggcggtcggcggcggctgcagcgctagcggcgcgggggctgggcggcggcgccggcatgaggcgcagggccggtgtccgcgggagggtggcgctgccggcggcccggccgctcccgctgcaattgctcgctgggctcgtcgtgccctgccagtggggcccccgcagctctcgtcggccgccgctggtgaccactcgccgcccctccggaggcttcacccgcgccctcccccaggacgcgccagcggagctccggctccttcgccctggacgcggaggccgcggtgtgcggggcgacggcgaggccggaagatggcctgggtgctcaagatggacgaggtgatcgagtccgggctggtgcacgacttcgacgccagcctctcgggcatcgggcaggaactgggcgccggcgcttacagcatgagtgatgtcttggcattgcccattttcaagcaggaagattccagccttccattggatggtgaaacagagcacccaccctttcagtatgtgatgtgtgctgcaacgtcaccagcagtaaaactgcatgatgaaacgcttacttatttgaaccaaggtcagtcatatgaaattcggatgctggataatcggaaaatgggtgatatgcctgagatcaatggaaaattagtaaagagcatcataagggttgtattccatgacagacggctacaatacacagagcatcagcaacttgaaggatggaagtggaatcgcccaggagacagacttcttgatttagatattccaatgtctgtgggaataattgacacaaggacgaatccaagccagttaaatgcggttgaatttctgtgggacccagcaaaacgcacctctgctttcattcaggtacactgcatcagcacagaatttactccacggaagcacggaggtgaaaagggagtgccctttaggatccaggttgacgcctttaagcagaatgaaaatggagaatacacagatcatctacactcagctagctgccaaatcaaagtttttaagcctaaaggtgcagacaggaaacaaaaaactgaccgagagaagatggagaagagaacagctcatgaaaaagaaaagtatcagccgtcctatgataccacaatcctcacagagatgaggcttgagcctataattgaagatgcagttgaacatgagcagaaaaagtccagcaagcggactttgccagcagactacggtgattctctggcaaagcgaggcagttgttctccgtggcccgatgcccccacagcctatgtgaataacagcccttccccagcgcccactttcacctccccacagcagagcacttgcagtgtcccagacagcaattcttcttccccaaatcatcagggagatggagcttcacagacctctggtgaacaaattcagccttcagctacgatccaggaaacacagcaatggctgctcaaaaacagattctcttcctacacaagactgttctctaatttttcaggtgccgacttattaaaactgacaaaggaggatttagttcaaatttgtggtgcagccgatggaattcggctctataattcactgaagtcaaggtcggttagaccccgtttaaccatctatgtctgccgggagcagccaagcagcacagtgctgcaagggcagcagcaagctgcaagcagtgcaagcgagaatggcagtggggcaccctatgtttatcatgcaatctacttggaagaaatgattgcctcagaagttgctcgaaaacttgcgctggtgtttaatatccctctccaccaaattaatcaggtttacagacagggtcccaccggtattcacattcttgttagtgatcagatggttcagaattttcaagatgagagttgttttttattctccacagtgaaagctgaaagtagtgatggcatccacataattttgaagtgatgtcttatatagactgaactgtattcagtaccaaatagtcacgcttaaaagtgtgtgaagactgaatccaagaagtcttgggattggattttaccatatgaaatgtttcatattgaaaacacaagatgacctttctaatgagctgtatgagaggtgaatctcctcactgtcactgccatagccaagcatcctcatgagagtgagcacatcggcacagcatgcatccagctctggaggccacggtgcaggcatagctgcctgctgctctggcagaggccagtaaatacagttcctagaagcagcctttgctgtctttttacactgtatgcggtttggaaatgaatgtagaaacttactgtgggcatttacctttctgtgccagtttggcttttattgcctgaaccttatgctgacctggagaggagatgggggacagtgctgttgtggggccagcagtgaatctgtatgcggagagttgtgttgtgctgatgtggccgttggtggtcaggtaagaggctcggcaccttcttggaagaaatcatgtctgagggtgtacgtttgatatgatcatgccagattggagaagatccaagccaggaagatgggcttgaagcaaactgcattatcaggagtaccttggtgagaggatcagtgtaaatcctaataggtacaaagacttttgtgttttggctttgtcacagatttattgaaaaacttttttgcttctgcttccatttttagcattttagtttctggttttcatttttggagattccttgccttttaaactcgtggtttttctctcattttcttccctctctccctccatctctgaccacccccaccctaaccccccacccccaccatcctattaaacatttttaaagccctaccccagacattggaaataggtgacccaagtagggggagaaagtattattgttgatagcttctgactaggtgttaagggatcttcattatgaacaagatgaatttttttctggaaacactagatgttatcaatcaaacactaaaatgtaccatacaaatcccttaagcctctcaaatattgagctttagtacaatcatggatagacattctggtgatgatttaggggctttttatacaccacatactagcttctttctctataagagtgcctctttcataaaaccaaatgcttgtctgctagcatacttttcaaagggaatccactgttttctcactttcatcccatatctccgtccttcatccaaaaccttcccagaatccatcagcaagcatgtttgaggcctgtggtgtaggggactgaatttttttttaacttctattccattttaattgtaggatatctttgtccatatacccaggtgtcctgatttgaatgtactatttgatcctcattgtgttcaggcaaaaaataggaaatgagtaattttgagtttgaaatctctcccagaagacaaactacttcagtgagtaaaagctttgacattttatgttttattcataaagggggttaattatttgctacaaagaagcacgatctattttcatcatcgatttgaaaatatctgtaactcctatagatcctataggcagagagttttcctttctgactttttccctttgctttcgtgtgaccacatgttttctgtaccagtcactggggaaagaagtgagtttatctcgtttgttttaaaagttttgcttgtctatttagcattcctttttgggtctcaagatttatggaacaataaatgtcatttaatgctgtgtgcttattttgaattcctcatcaggttttagaagcggggtaaaaatacttagatgcttatcagacttgaaattatactgagtggcattgaacgtgagtttgtcccagtgaaacaggctaaataaattttggcaccagcaaatttgttactttgtttttttaatagtaggatgtacacatttcagtataataaatgttttctgattgttttgcgaaaaaaaaaaaaaaa

SEQ ID NO: 2384 - DNA, 7758 bp, Homo sapiens
ccggccacaggtttccgcttgcctctggccgggggtcggcaactgcaggcgtcagtttccctcaagatggcggacgaggaggctggaggtactgagaggatggaaatcagcgcggagttaccccagacccctcagcgtctggcatcttggtgggatcagcaagttgatttttatactgctttcttgcatcatttggcacaattggtgccagaaatttactttgctgaaatggacccagacttggaaaagcaggaggaaagtgtacaaatgtcaatattcactccactggaatggtacttatttggagaagatccagatatttgcttagagaaattgaagcacagtggagcatttcagctttgtgggagggttttcaaaagtggagagacaacctattcttgcagggattgtgcaattgatccaacatgtgtactctgtatggactgcttccaggacagtgttcataaaaatcatcgttacaagatgcatacttctactggaggagggttctgtgactgtggagacacagaggcatggaaaactggccctttttgtgtaaatcatgaacctggaagagcaggtactataaaagagaattcacgctgtccgttgaatgaagaggtaattgtccaagccaggaaaatatttccttcagtgataaaatatgtcgtagaaatgactatatgggaagaggaaaaagaactgcctcctgaactccagataagggagaaaaatgaaagatactattgtgtccttttcaatgatgaacaccattcatatgaccacgtcatatacagcctacaaagagctcttgactgtgagctcgcagaggcccagttgcataccactgccattgacaaagagggtcgtcgggctgttaaagcgggagcttatgctgcttgccaggaagcaaaggaagatataaagagtcattcagaaaatgtctctcaacatccacttcatgtagaagtattacactcagagattatggctcatcagaaatttgctttgcgtcttggttcctggatgaacaaaattatgagctattcaagtgactttaggcagatcttttgccaagcatgccttagagaagaacctgactcggagaatccctgtctcataagcaggttaatgctttgggatgcaaagctttataaaggtgcccgtaagatccttcatgaattgatcttcagcagtttttttatggagatggaatacaaaaaactctttgctatggaatttgtgaagtattataaacaactgcagaaagaatatatcagtgatgatcatgacagaagtatctctataactgcactttcagttcagatgtttactgttcctactctggctcgacatcttattgaagagcagaatgttatctctgtcattactgaaactctgctagaagttttacctgagtacttggacaggaacaataaattcaacttccagggttatagccaggacaaattgggaagagtatatgcagtaatatgtgacctaaagtatatcctgatcagcaaacccacaatatggacagaaagattaagaatgcagttccttgaaggttttcgatcttttttgaagattcttacctgtatgcagggaatggaagaaatccgaagacaggttgggcaacacattgaagtggatcctgattgggaggctgccattgctatacagatgcaattgaagaatattttactcatgttccaagagtggtgtgcttgtgatgaagaactcttacttgtggcttataaagaatgtcacaaagctgtgatgaggtgcagtaccagtttcatatctagtagcaagacagtagtacaatcgtgtggacatagtttggaaacaaagtcctacagagtatctgaggatcttgtaagcatacatctgccactctctaggacccttgctggtcttcatgtacgtttaagcaggctgggtgctgtttcaagactgcatgaatttgtgtcttttgaggactttcaagtagaggtactagtggaatatcctttacgttgtctggtgttggttgcccaggttgttgctgagatgtggcgaagaaatggactgtctcttattagccaggtgttttattaccaagatgttaagtgcagagaagaaatgtatgataaagatatcatcatgcttcagattggtgcatctttaatggatcccaataagttcttgttactggtacttcagaggtatgaacttgccgaggcttttaacaagaccatatctacaaaagaccaggatttgattaaacaatataatacactaatagaagaaatgcttcaggtcctcatctatattgtgggtgagcgttatgtacctggagtgggaaatgtgaccaaagaagaggtcacaatgagagaaatcattcacttgctttgcattgaacccatgccacacagtgccattgccaaaaatttacctgagaatgaaaataatgaaactggcttagagaatgtcataaacaaagtggccacatttaagaaaccaggtgtatcaggccatggagtttatgaactaaaagatgaatcactgaaagacttcaatatgtacttttatcattactccaaaacccagcatagcaaggctgaacatatgcagaagaaaaggagaaaacaagaaaacaaagatgaagcattgccgccaccaccacctcctgaattctgccctgctttcagcaaagtgattaaccttctcaactgtgatatcatgatgtacattctcaggaccgtatttgagcgggcaatagacacagattctaacttgtggaccgaagggatgctccaaatggcttttcatattctggcattgggtttactagaagagaagcaacagcttcaaaaagctcctgaagaagaagtaacatttgacttttatcataaggcttcaagattgggaagttcagccatgaatatacaaatgcttttggaaaaactcaaaggaattccccagttagaaggccagaaggacatgataacgtggatacttcagatgtttgacacagtgaagcgattaagagaaaaatcttgtttaattgtagcaaccacatcaggatcggaatctattaagaatgatgagattactcatgataaagaaaaagcagaacgaaaaagaaaagctgaagctgctaggctacatcgccagaagatcatggctcagatgtctgccttacagaaaaacttcattgaaactcataaactcatgtatgacaatacatcagaaatgcctgggaaagaagattccattatggaggaagagagcaccccagcagtcagtgactactctagaattgctttgggtcctaaacggggtccatctgttactgaaaaggaggtgctgacgtgcatcctttgccaagaagaacaggaggtgaaaatagaaaataatgccatggtattatcggcctgtgtccagaaatctactgccttaacccagcacaggggaaaacccatagaactctcaggagaagccctagacccacttttcatggatccagacttggcatatggaacttatacaggaagctgtggtcatgtaatgcacgcagtgtgctggcagaagtattttgaagctgtacagctgagctctcagcagcgcattcatgttgacctttttgacttggaaagtggagaatatctttgccctctttgcaaatctctgtgcaatactgtgatccccattattcctttgcaacctcaaaagataaacagtgagaatgcagatgctcttgctcaacttttgaccctggcacggtggatacagactgttctggccagaatatcaggttataatataagacatgctaaaggagaaaacccaattcctattttctttaatcaaggaatgggagattctactttggagttccattccatcctgagttttggcgttgagtcttcgattaaatattcaaatagcatcaaggaaatggttattctctttgccacaacaatttatagaattggattgaaagtgccacctgatgaaagggatcctcgagtccccatgctgacctggagcacctgcgctttcactatccaggcaattgaaaatctattgggagatgaaggaaaacctctgtttggagcacttcaaaataggcagcataatggtctgaaagcattaatgcagtttgcagttgcacagaggattacctgtcctcaggtcctgatacagaaacatctggttcgtcttctatcagttgttcttcctaacataaaatcagaagatacaccatgccttctgtctatagatctgtttcatgttttggtgggtgctgtgttagcattcccatccttgtattgggatgaccctgttgatctgcagccttcttcagttagttcttcctataaccacctttatctcttccatttgatcaccatggcacacatgcttcagatactacttacagtagacacaggcctaccccttgctcaggttcaagaagacagtgaagaggctcattccgcatcttctttctttgcagaaatttctcaatatacaagtggctccattgggtgtgatattcctggctggtatttgtgggtctcactgaagaatggcatcaccccttatcttcgctgtgctgcattgtttttccactatttacttggggtaactccgcctgaggaactgcataccaattctgcagaaggagagtacagtgcactctgtagctatctatctttacctacaaatttgttcctgctcttccaggaatattgggatactgtaaggcccttgctccagaggtggtgtgcagatcctgccttactaaactgtttgaagcaaaaaaacaccgtggtcaggtaccctagaaaaagaaatagtttgatagagcttcctgatgactatagctgcctcctgaatcaagcttctcatttcaggtgcccacggtctgcagatgatgagcgaaagcatcctgtcctctgccttttctgtggggctatactatgttctcagaacatttgctgccaggaaattgtgaacggggaagaggttggagcttgcatttttcacgcacttcactgtggagccggagtctgcattttcctaaaaatcagagaatgccgagtggtcctggttgaaggtaaagccagaggctgtgcctatccagctccttacttggatgaatatggagaaacagaccctggcctgaagaggggcaacccccttcatttatctcgtgagcggtatcggaagctccatttggtctggcaacaacactgcattatagaagagattgctaggagccaagagactaatcagatgttatttggattcaactggcagttactgtgagctccaactctgcctcaagacaatcacaaatgacgacagtagtaaaggctgattcaaaattatggaaaactttctgagggctgggaaagtattggagggtcttttgctccatgtccaggttcacttacatcaataaaatatttcttaatggagtattgctttcaattagcaaacatatgcttcacaggaaaaaaggacatagatcaatctgttttatgtgctagtatttccaggaatttattccccttcataatttgtctcatttcattttatttcatccacttggtagatgaagtcacgtcaaacagttgtagacattttatatgttggttaactcttctgcaattttgtatttggtgttttccccccaagtttagttcaactgacattggatcactgacaaaattctaataatctgtgatagtcttccttgcagttaaagaagaattgcagaaaccatgcaatatacttgggaaagattccaaaaataaattttttattatttctcttttaaggaaatacccctaatgtgccacctgctgctatcaccacaaattaaactcaatctctatgtggacagaggatgatttctgccaatatggaaaagcttttttctcactgtaggcctcaagaaaagttagggtaatgtatttgttattcattcctgacggtacaaagagcttgcagttctcacctctgactaccagtagctttgttgagttttgaaataatacttgacattttccaaaggcaaatctcattctgcaaggagattgtggcaccatcctgtttgactctcagaaacctcttgtaattctgatgtaaaaactgtagaatgaagatgagaaaattctcgcaatgagtggatcatgacaactgtaaattagaacaatcagatttaaaccaattccgcagtcttctatatctttgtaaaagacaaatccttgatgttgtctgtgtgcaaccttttcataaactctggttttatgactagtacaaaccaccaaaaaagccatgtgatcaatagtctgtgtcctgttataacatgctgtggttgagccatcttgtttataaataatagagctctcctgaatttgtgcatagacttcttggttcctggcttttgttttttgtatcaagagattgtgatataaaacagcagaagataaatggaaaccttccattttaacttacgttgtttctggggtaatgttagaaccttgaaagatgcattcaaagactgtatcttattttgcccttggctattagtgtctcacatatgtgtgtaaatgttttcctaccttctttttgctcagcaaaggcaagcaagtaaaatatatttgctaagtgattagtgatgcacatttggggctagatttttttggtacttttatgtaaagaaaagtggattttgcagtaagggattggcatgagcaggcgtcagaatcacaatcatgattttctacttgaataattacaattcagaaggtatctggataaatagatacatgtctagtgaacaatttgtaacaataacaggtaaggatcaggaaattcagtattcagtttgtcagatttgccagaatgatgaaagtatttgaacatgtgtgtttgtttcttatataattgtattgagtggattgtttgactgggaaatctgggctagaataggaaacagaagatactgacttctaccctaatagatgggccccaatttagcaaagataaactgactttatttttagtcctttttatattaacttaataaattctggagttaggctctcaagaggacagagggactgtctggcaatggccagccagacctttactgccaaagaacccatttcatattgcgttccactgattgagattgattcagatttttgcactgtagatgagcgtatgtctcagtgctgccccaagccccagggatttctcattatgttcaaatgtcctagtgatttaccttaatcattgcaaacaattatgcttatgaagtttacttacaaacaagcaactgagtcactttattttctttagtgtagtatgtgaaggcactggttcaacaggatggctccagaactgtgtttttctaatgtttggtaaggggctagtgagaattttaatgatatggtgaagaaaaatatatctgtataattaatttattatattggtgtatgggctgtgagttcaccttttagtggtcatttgtcatttcataacaactatgcattttggttcactgtgatgatgatctatatttagtgactgcaacatgtttataccactgattcaaattccatccatgatgaagttatacaaataatgcatatattgataacttttattgcaaaaatgtaaatttaaaacttgtataatgttcttgtgctttttaaaataaaatatatgtgtatatttaaaaagaaaaaaaaaaaaaaa

SEQ ID NO: 2385 - DNA, 1833 bp, Homo sapiens
tgcgcgccgcccggccaggcccgcaaagaggcctccgagcgccatggctgcgcccccggcccgcgcggacgctgatccttcgcccacgtcgccacctacggcccgagacacaccaggccggcaggctgagaaaagcgagaccgcgtgcgaggaccgcagcaatgcagagtccctggacaggctcctgccacctgtgggcactgggcgctctccccggaagcggaccaccagccagtgcaagtcagagcctcccctgctgcgtacaagcaagcgtaccatctacaccgccgggcggccgccctggtacaatgaacacggcacgcaatccaaagaggccttcgccatcggcttgggaggcggcagtgcctctgggaagaccactgtggccagaatgatcatcgaggccctggatgtgccctgggtggtcttgctgtccatggactccttctacaaggtgctgactgagcagcagcaggaacaggccgcacacaacaacttcaacttcgaccacccagatgcctttgacttcgacctcatcatttccaccctcaagaagctgaagcaggggaagagtgtcaaggtgcccatttatgacttcaccacgcacagccggaagaaggactggaaaacactgtatggtgcaaacgtcatcatctttgagggcatcatggcctttgctgacaagacactgttggagctcctggacatgaagatctttgtggacacagactccgacatccgcctggtacggcggctgcgccgggacatcagtgagcgcggccgggacatcgagggtgtcatcaagcagtacaacaagtttgtcaagccctccttcgaccagtacatccagcccaccatgcgcctggcagacatcgtggtccccagagggagcggcaacacggtggccatcgacctgattgtgcagcacgtgcacagccagctggaggagcgtgaactcagcgtcagggctgcgctggcctcggcacaccagtgccacccgctgccccggacgctgagcgtcctgaagagcacgccgcaggtacggggcatgcacaccatcatcagggacaaggagaccagtcgcgacgagttcatcttctactccaagagactgatgcggctgctcatcgagcacgcgctctccttcctgccctttcaggactgcgtcgtacagaccccgcaggggcaggactatgcgggcaagtgctatgcggggaagcagatcaccggtgtgtccattctgcgcgccggtgaaaccatggagcccgcgctgcgcgctgtgtgcaaagacgtgcgcatcggcaccatcctcatccagaccaaccagcttaccggggagcccgagctccactacctgaggctgcccaaggacatcagcgatgaccacgtgatcctcatggactgcaccgtgtccacgggcgcggcggccatgatggcagtgcgcgtgctcctggaccacgacgtgcctgaggacaagatctttttgctgtcgctgctcatggcagagatgggcgtgcactcagtggcctatgcatttccgcgagtgagaatcatcaccacggcggtggacaagcgggtcaatgaccttttccgcatcatcccaggcattgggaactttggcgaccgctactttgggacagacgcggtccccgatggcagtgacgaggaggaagtggcctacacgggttagctgcccagtgagccatcccgtccccaccaccctcctcctgcctcctgacccaggactgctgaatacaaagatgttaatttttaaaatgttactagtataatttattctatgcattttataaaataaataaagctttagaaaaa

SEQ ID NO: 2386 - DNA, 1546 bp, Homo sapiens
gtagtgcctggccccagccccaggcagccacagcaggctgccttaccccagaagcagctggtggcgcctgacctcacgatgaccaggtgtgctctgctgttgctgatggtcctgatgttgggcagagtcctggttgtcccagtgacccctatcccaaccttccagctccgccctcagaattctccccagaccactccccgacctgcggcctcagagagcccctcagctgctcccacatggccgtgggctgcccagagccactgcagccccacccgccaccctggctcgcgcattgtcctatcgctggatgtccccatcggcctcttgcagatcttactggagcaagcccgggccagggctgccagggagcaggccaccaccaacgcccgcatcctggcccgtgtcggccactgctgagcctgagagagggggtcacagtgatagggccaccctggatgggaagacctggagggcagccacacagctggacggatgctgccacatctgggcatacagtgtctggacgctgccacatctgggcatacagtgtctggacactgccacatggagccactgtcatgcaggtcatatcagatctgagtgccccacagagtcacagtgtgtctggacagcctggacattggacattgctaagttgggtcactgccacatggagtcttgccatgcctgtgtgccccacagacctaatatatgtccggacagcttggatgctgccacgtaaggtcactgctgtggcgagtcttgctatgtctgggtgccccatagtcacagaacacctggacaccgccacatgcagtcatcatcatgttactttcaggagcctcaacacgagagctcaacactgcctccgaccagtccctctgaggcccacaggtctgtcatcccataggccaccacacagagaaatgctggctgagggtcacttgcttgctctgtgccccatgaggcagcacctgccccagatggacggggctgtgaggggtgtctccaggcacaaaggcccgaacacaggaagcctgtgaccatggcagccttgtcttatgggcgcatatgtgcgtgtgtggctgagtctctgacagctgtgagtgtgtgtgagcagggtaagggtacgtgaggggtctgagaggagtgggtgcttgtcccccaaacctgcatgaagcaagaacaactcctggccaggccctgtcctccccacgtacccctgcatccccagcctcgacccagggacatgcagggctcacaggagacagggctcaggctgccggagctccaaccaaactctgtcccacttcacgcacggactgtcctgggcaaaggtgttcacctttccgagcctcggtttccttatctgtaaagcaaagcgacaccagcaagcctgtgagcattgtgtatatagcagacatggaggtcctgcagcaggaggtgctcaataaacacaaagcgactgaaggatgggaccagcaaaaaaaaaaaaaaaaaaaaaaaaaaaaaaaaaaaaaaaaaaaaaaaaaaaaaaaaaaaaaaa

SEQ ID NO: 2387 - DNA, 1501 bp, Homo sapiens
cctctggggcgtaccggcttggcgcggcggcagcggcagcggcggctgggagagcggtcggcggggtttcttcgttgcattgcctgagaggagcggagtctgccaggtggtgtccatcatgttctctttcaacatgttcgaccaccctattcccagggtcttccaaaaccgcttctccacacagtaccgctgcttctctgtgtccatgctagcagggcctaatgacaggtcagatgtggagaaaggagggaagagccgacttaacattacctatcccatgctgttcaaactgaccaataagaattcggaccgcatgacgcattgtggcgtgctggagtttgtggctgatgagggcatctgctacctcccacactggatgatgcagaacttactcttggaagaaggcggcctggtccaggtggagagcgtcaaccttcaagtggccacctactccaaattccaacctcagagccctgacttcctggacatcaccaaccccaaagccgtattagaaaacgcacttaggaactttgcctgtctgaccaccggggatgtgattgccatcaactataatgaaaagatctacgaactgcgtgtgatggagaccaaacccgacaaggcagtgtccatcattgagtgtgacatgaacgtggactttgatgctcccctgggctacaaagaacccgaaagacaagtccagcatgaggagtcgacagaaggtgaagccgaccacagtggctatgctggagagctgggcttccgcgctttctctggatctggcaatagactggatggaaagaagaaaggggtagagcccagcccctccccaatcaagcctggagatattaaaagaggaattcccaattatgaatttaaacttggtaagataactttcatcagaaattcacgtccccttgtcaaaaaggttgaagaggatgaagctggaggcagattcgtcgctttctctggagaaggacagtcattgcgtaaaaagggaagaaagccctaagtgaggactgttggctgattggaaaataataaaagaatcatttgcaacatcttggcttttagttactggcactgacagggacgagcctcatcagagaatactctgttacttaagatttatttagagttacctaagaattattaagtttgacttggaagtggagcagcaggactttgtagttgtatgcttgatttggggaaagacaaagagctgtccctgagggcctgtagatagctgcctcctcacctcttcacgctttcagcttgaggggagctcccactgcctcagcaggagcaattctgcatccctaattctgtcaaaacctatgaaggtgactaaattgtctaacatgaagtgttctttctttttcttcatttatcctttcttttcctacatcaattgcataggtgtcagtctttggcctaaaaaaaggctttaaatagacatgtgttctataagtagtggctgtcccactactgtggctgcaattta

SEQ ID NO: 2388 - DNA, 1534 bp, Homo sapiens
cctctggggcgtaccggcttggcgcggcggcagcggcagcggcggctgggagagcggtcggcggggtttcttcgttgcattgcctgagaggagcggagtctgccaggtggtgtccatcatgttctctttcaacatgttcgaccaccctattcccagggtcttccaaaaccgcttctccacacagtaccgctgcttctctgtgtccatgctagcagggcctaatgacaggtcagatgtggagaaaggagggaagataattatgccaccctcggccctggaccaactcagccgacttaacattacctatcccatgctgttcaaactgaccaataagaattcggaccgcatgacgcattgtggcgtgctggagtttgtggctgatgagggcatctgctacctcccacactggatgatgcagaacttactcttggaagaaggcggcctggtccaggtggagagcgtcaaccttcaagtggccacctactccaaattccaacctcagagccctgacttcctggacatcaccaaccccaaagccgtattagaaaacgcacttaggaactttgcctgtctgaccaccggggatgtgattgccatcaactataatgaaaagatctacgaactgcgtgtgatggagaccaaacccgacaaggcagtgtccatcattgagtgtgacatgaacgtggactttgatgctcccctgggctacaaagaacccgaaagacaagtccagcatgaggagtcgacagaaggtgaagccgaccacagtggctatgctggagagctgggcttccgcgctttctctggatctggcaatagactggatggaaagaagaaaggggtagagcccagcccctccccaatcaagcctggagatattaaaagaggaattcccaattatgaatttaaacttggtaagataactttcatcagaaattcacgtccccttgtcaaaaaggttgaagaggatgaagctggaggcagattcgtcgctttctctggagaaggacagtcattgcgtaaaaagggaagaaagccctaagtgaggactgttggctgattggaaaataataaaagaatcatttgcaacatcttggcttttagttactggcactgacagggacgagcctcatcagagaatactctgttacttaagatttatttagagttacctaagaattattaagtttgacttggaagtggagcagcaggactttgtagttgtatgcttgatttggggaaagacaaagagctgtccctgagggcctgtagatagctgcctcctcacctcttcacgctttcagcttgaggggagctcccactgcctcagcaggagcaattctgcatccctaattctgtcaaaacctatgaaggtgactaaattgtctaacatgaagtgttctttctttttcttcatttatcctttcttttcctacatcaattgcataggtgtcagtctttggcctaaaaaaaggctttaaatagacatgtgttctataagtagtggctgtcccactactgtggctgcaattta

SEQ ID NO: 2389 - DNA, 6675 bp, Homo sapiens
tgctttgcgaggctgggtgttgagtcgagccgcgggaaaggcgcgtgtcggcctctcactggcgcagcctgcactgccgctgccgcctcgccccgccctgccctggcgttgtctctggcactgtggcggactgaccacggcccgggcatgggctgcaagggagacgcgagcggtgcgtgtgccgcgggtgcgctgccggtgacaggtacccaggggtggcgtgaggaggcctcgtggacaaagagagggtttggggcacaaggcgaccctgtgcccctgtcacattgagcttccgcctctaccgtgactcagtttaccctctggtgtcctatcccttcccctattcgcgagcgccccgagttgccctcagtggtcttcttggcaaggagtttgctataaaatgggagttctggttgtactcactgttctgtggctgttctcctcagtaaaggccgactcaaaagccattacaacctctcttacaacaaaatggttttccactccattgttgttagaagccagtgagtttttagcagaagacagtcaagagaaattttggaattttgtagaagccagtcaaaatattggatcatcagatcatgacggtaccgattattcctactatcatgcaatattggaggctgcatttcagtttctgtcacccctccagcagaatttgtttaaattttgtctgtcccttcgttcttactcagctacaatccaagccttccagcagatagcagctgatgaacctccaccagaaggatgtaattcgtttttttcagtgcatggaaagaagacttgtgaatctgatacccttgaggctcttctactgacagcctctgaaagacccaaacctttattgttcaaaggagatcacagatatccctcgtctaatcctgaaagccctgtggtgattttctactctgagattggctctgaggaattttccaattttcaccgccagcttatatcaaaaagcaatgcaggcaaaatcaattatgtattcagacattatatatttaatcccaggaaggagcctgtttacctctctggctatggcgtggaattggccattaagagcactgagtacaaggccaaggatgatactcaggtgaaaggaactgaggtaaacaccacagtgattggtgaaaatgatcctattgatgaggttcaggggttcctctttggaaaattaagagatctgcaccccgacctggagggacagttgaaagaactcagaaagcatcttgtagagagcaccaatgaaatggcacctttaaaggtttggcagttgcaagatctcagtttccagactgctgctcgaatcttggcttctcctgttgagttggctttggttgtcatgaaggatcttagtcagaattttcctaccaaagccagagcaataacaaaaacagctgtgagctcagaacttagaaccgaagtggaagagaatcagaagtatttcaagggaactttaggattacaacctggagattcagccctcttcatcaatggacttcacatggatttagatacacaggatatattcagtctgtttgatgtgttgaggaatgaagctcgggtaatggagggtctgcatagattgggaatagaaggcctttctctgcataatgttttgaagctgaacatccagccctctgaggcagactatgccgtagacatccggagtcctgctatttcatgggtcaacaacctggaggttgatagcagatataattcgtggccttctagtttacaagagttgcttcgacccacctttcctggtgttattcggcagatcaggaaaaacttacataatatggttttcatagttgatcctgcacatgagaccacagcagagttgatgaacacagctgagatgttccttagtaatcatataccactaagaattggttttatctttgtggttaatgactctgaagatgttgatgggatgcaagatgctggagtggctgttcttagagcatataattatgttgcccaagaagtggatgattatcatgccttccagactctgacacatatctataacaaggtgaggactggagaaaaagtgaaagttgaacatgtggtcagtgtcctggagaagaaatatccgtatgtagaagtgaatagcattttggggattgattctgcttatgatcggaatcggaaggaagcaagaggctactatgagcagactggagttggacctctgcccgttgtgctgttcaatggaatgccctttgaaagggaacagctagaccctgatgagttagaaaccatcacaatgcataaaatcctggagaccaccaccttcttccaaagagcggtgtacttgggtgaactgccccatgatcaagatgtggtagagtatatcatgaatcagccaaatgttgttccacgaatcaattctaggattttgacagctgaacgagactacctggatttaacagcgagtaataacttctttgtggatgattatgctagatttactatcttggattcccaaggcaagactgctgctgtagccaatagtatgaactatctgacaaagaaaggaatgtcctccaaggaaatctatgatgattcttttattaggccagtaactttttggattgttggggattttgatagcccttctggacggcagttactgtatgatgccatcaaacatcagaaatccagtaacaatgttagaataagcatgatcaataatcctgccaaagagataagctatgagaacactcagatctccagagcaatctgggcagctctccaaactcagacttccaacgctgctaagaacttcatcaccaaaatggccaaggagggggctgcagaggccctggctgcaggagctgacattgcggagttctctgttgggggaatggatttcagtctttttaaagaggtctttgagtcttccaaaatggatttcattttgtctcatgccgtgtactgcagggatgttctgaagctgaagaagggacagagggcagtgatcagcaatggaaggatcattgggccactggaggatagtgagctctttaatcaagacgatttccacctcctcgaaaatatcatcttaaaaacctcaggacagaaaataaaatctcatattcaacagcttcgggtagaagaagatgtggcaagcgacttggtaatgaaggtggatgctcttctgtcagcgcaaccaaaaggagatccaagaatcgagtaccagttttttgaagacagacacagtgcaatcaaactgaggccgaaggaaggggagacatactttgatgttgtggctgtcgttgaccctgtcaccagagaagcacagagacttgctcctttgctcttggttttggctcagctgataaacatgaatctgagagtatttatgaactgccaatccaaactttctgacatgcctttaaaaagcttttaccgttatgtcttagaaccagagatttctttcacttcagacaatagttttgctaagggtccaatcgcaaaatttttggatatgcctcagtctccactgttcactctgaatttgaacacacctgagagctggatggtagaatctgtcagaacaccatatgatcttgataatatttatttagaagaggtggacagtgtagtggctgctgagtatgagctggaatacctgttactggaaggtcattgctacgacatcaccacaggccagcctccacggggactacagtttaccttaggaacttcagccaacccggtcattgtggacaccattgttatggccaatctgggctactttcagctgaaagccaacccaggagcttggatcctcagacttaggaagggacgctctgaagatatttatagaatttacagccacgatggcactgattctccccctgatgctgatgaggtggttatcgtcctcaacaacttcaaaagcaaaattattaaagtgaaggttcagaagaaggcagatatggtgaacgaagacttgctgagtgatggaacgagtgagaatgaatctggattttgggattccttcaaatggggctttacaggacagaagactgaggaagtgaagcaagataaagatgacataattaatattttctccgttgcatctggtcatctctacgaaagatttcttcgcataatgatgctatccgtgctgaagaataccaagactcctgtgaaattctggttcttgaagaattacttgtcccccacatttaaggagtttataccttacatggcaaatgaatacaatttccagtatgagcttgttcagtacaaatggccccggtggcttcatcaacaaactgaaaaacagcgtatcatctggggttacaagatcctcttcctggatgtacttttcccactagttgttgacaagttcctgtttgtggatgctgatcagattgtacgaacagatctgaaagagttaagagatttcaatttggatggtgctccttatggttacactcctttctgtgacagccgaagagaaatggacggctacaggttctggaagtcagggtactgggccagtcatttagccgggcgaaagtatcatatcagtgcactatatgttgtggatctgaagaagtttaggaaaatagctgctggtgacagactcaggggacagtaccaaggtctgagtcaggaccctaacagcctttcaaatcttgatcaagatctgcccaataacatgattcatcaggtgccaattaaatccctccctcaagaatggctttggtgtgaaacgtggtgtgatgacgcctctaagaaaagggcaaaaaccattgatttgtgtaataatccgatgaccaaagagccgaaactggaagcagctgtgcggattgtcccggagtggcaggactacgaccaagagatcaaacagctacagatccgctttcagaaggagaaagaaacgggagcactgtacaaagagaagacaaaagaaccaagccgagaaggtcctcagaaacgtgaagaattatgatctctggagaaggacaggaaatcaccccatttgaaaaacagtttttataataaatgctagttttttctgatctgtctatacaactgctgataagccggctgggcaggagtgccacaccttttgattctgagcatttgattctgacttctgtactctggtggccactggatctttgggattaaagctctgttggatttgtacctcagaggaagaccaagtggctgatcctttggactctgtaaagagcattcttctagtcagagggtggaatggcagcagcaactggaagaaaatgagttttttggtgcccacacccaagagcacacacatgctgcactgtctcggaaagcagggccagctagagccaccatgttcttccttacctcagtttacctgcggcctgcgctgcactgcagatgcccaccctgccctgggtctggccggcggaagctctgtccaaggtccacacacctccaggtttacgccaacatccttgtgccctccccaccttctcttccaacgcattaggtgcattgtttaattgaaatccaaccaacaattgtgtgtcaaggctggtttggtgcagtggctgggcaaattaattttgggccaggatgggggtgggttgcagtgagggtagggaaaatgtcaggagtaggaaggttcgggggttaagggaagggaaggaagaccagaactggccatcctcttttataatccattagtagcaccatggctcatttgaaatgaaaatattacacttattccccacccaaccgcagtgaactttctaggtaattgttttgaaaacaatttttgtatctgtgaaagtctttgctttttctttccaccttctagaaaagtctgctaccagtttccttactgaatacagccatactcagcccctctcgcatccagcccgtcagggtcagggtcagggtcaggctccctcaagacgagcaccgcattgtctgccctcttttgcgtaggatttttctctcagacccaggggacattgccttggacttttctctacaaatgccctcagatgtaagaccagaaatgattctgcttgtggaactcgtggctttctgtcctattttccttttatgtgagccctgcaggttgcctttggcgcccacaccagttctgtcttcatgtcgctgcatcgtgaagccccatttgcctttagtccctgctttgtgtgtcttcacttccacagccagtgttgcccctcagggcatactttgctggtgaacgggctgtagagtcttgagtatgttattggcctaagtgggcatgaggccccagcatccgactccatctgccaggctgcagggcacagcagcactggcatagacaggcacgctctgtcttccaacgtgcaccagccttttcttacatattttgcctgtttttaaaaaatacgaggagagggtgcagatggatactgtgccctcaccctcctaagccaggtaatatattgatgtgcagacttttaagaaatcttagtcttatcacaaatatcaagtaatttattttttccattttcaaatgcaaaagttagcctaggaagcctcccagtcatcctgaaggaccttttgactttgcttttataattctgttaaaaattgaggaggggattaatgagtacaatgaaaacaaaacaaaacaaaaaa

SEQ ID NO: 2390 - DNA, 1362 bp, Homo sapiens
aaaaccttgaggtgattcatcttccaggctctccttccatcaagtctctcctccctagcgctctgggtccttaatggcagcagccgccgctaccaagatccttctgtgcctcccgcttctgctcctgctgtccggctggtcccgggctgggcgagccgaccctcactctctttgctatgacatcaccgtcatccctaagttcagacctggaccacggtggtgtgcggttcaaggccaggtggatgaaaagacttttcttcactatgactgtggcaacaagacagtcacacctgtcagtcccctggggaagaaactaaatgtcacaacggcctggaaagcacagaacccagtactgagagaggtggtggacatacttacagagcaactgcgtgacattcagctggagaattacacacccaaggaacccctcaccctgcaggccaggatgtcttgtgagcagaaagctgaaggacacagcagtggatcttggcagttcagtttcgatgggcagatcttcctcctctttgactcagagaagagaatgtggacaacggttcatcctggagccagaaagatgaaagaaaagtgggagaatgacaaggttgtggccatgtccttccattacttctcaatgggagactgtataggatggcttgaggacttcttgatgggcatggacagcaccctggagccaagtgcaggagcaccactcgccatgtcctcaggcacaacccaactcagggccacagccaccaccctcatcctttgctgcctcctcatcatcctcccctgcttcatcctccctggcatctgaggagagtcctttagagtgacaggttaaagctgataccaaaaggctcctgtgagcacggtcttgatcaaactcgcccttctgtctggccagctgcccacgacctacggtgtatgtccagtggcctccagcagatcatgatgacatcatggacccaatagctcattcactgccttgattccttttgccaacaattttaccagcagttatacctaacatattatgcaattttctcttggtgctacctgatggaattcctgcacttaaagttctggctgactaaacaagatatatcattttctttcttctctttttgtttggaaaatcaagtacttctttgaatgatgatctctttcttgcaaatgatattgtcagtaaaataatcacgttagacttcagacctctggggattctttccgtgtcctgaaagagaatttttaaattatttaataagaaaaaatttatattaatgattgtttcctttagtaatttattgttctgtactgatatttaaataaagagttctatttcccaaaaaaaaaaaaaaaaaa

SEQ ID NO: 2391 - DNA, 802 bp, Homo sapiens; identical to SEQ ID NO: 1886

SEQ ID NO: 2392 - DNA, 5807 bp, Homo sapiens
gcgcgcgcgagggcgttgggcgccgccgcgaggcggggaagcgcggggccgcggcggtgcgggttctagggcggcggccgtcgccgtcgcagcagcgccccgagcggggagggccgaggaggcccgacgagctggggatggagagtaccgggcccctcactgcctcagagcgcgtgtgcggctctgggcgcgcacagtgacggtgacggcacccctggcccggcagcgccgaggccgcttcgccagacagccagcggccggcggcaggccgggccatgagcggcaggggccgggccgggcctcgctgaccctggctccgcgcggcagcttccccagtttccgctccggtctctcggcatgagagtccgcccgggcccggggctgcggctgccccagacccgccgcacgctggcgcgctccgggcccgcggagccgcggtgctgatacctgcgccgcactgcgccgcccgcccgtccgctgtgtgccccgggggcgcggccatggaggtggtgggtgacttcgagtacagcaagagggatctcgtgggacacggggccttcgccgtggtcttccgggggcggcaccgccagaaaactgattgggaggtagctattaaaagtattaataaaaagaacttgtcaaaatcacaaatactgcttggaaaggaaattaaaatcttaaaggaacttcagcatgaaaatattgtagcactctatgatgttcaggaattacccaactctgtctttttggtgatggagtattgcaatggtggagacctcgcagattatttgcaagcgaaagggactctcagtgaagacacgatcagagtgtttctgcatcagattgctgctgccatgcgaatcctgcacagcaaaggaatcatccacagagatctcaaaccacagaacatcttgctgtcctatgccaatcgcagaaaatcaagtgtcagtggtattcgcatcaaaatagcggattttggttttgctcgttacctacatagtaacatgatggctgcaacactgtgtggatccccgatgtacatggctcctgaggttattatgtctcaacattatgatgctaaggctgacttgtggagcataggaacagtgatataccaatgcctagttggaaaaccaccttttcaggccaatagtcctcaagacttaaggatgttttatgaaaaaaacaggagcttaatgcctagtattcccagagaaacatcaccttatttggctaatctccttttgggtttgcttcagagaaaccaaaaagatagaatggactttgaagcgttttttagccatccttttcttgagcaaggtccagtaaaaaaatcttgcccagttccagtgcccatgtattctggttctgtctctggaagctcctgtggcagctctccatcttgtcgttttgcttctccaccatcccttccagatatgcagcatattcaggaagaaaacttatcttccccaccattgggtcctcccaactatctacaagtttccaaagattctgccagtactagtagcaagaactcttcttgtgacacggatgactttgttttggtgccacacaacatctcgtcagaccactcatgtgatatgccaatggggactgctggcagacgtgcttcaaatgaattcttggtgtgtggagggcagtgtcagcctactgtgtcacctcacagcgaaacagcaccaattccagttcctactcaaataaggaattatcagcgcatagagcagaatcttacatctactgccagctcaggcacaaatgtacatggttctccaagatctgcagtggtacgaaggtccaacaccagccccatgggcttcctccggccgggatcatgctccccagtaccagcagacacagcacagacagttggacgaaggctctccactgggtcttctaggccttactcaccttcccctttggttggtaccattcctgagcaattcagtcagtgctgctgtgggcatcctcagggccatgactccaggagtagaaactcctcaggttctccagtgccacaagctcagtccccacagtctctcttatcgggtgctagactgcagagcgcccccaccctcactgacatctatcagaacaagcagaagctcagaaaacagcactctgaccccgtgtgcccatcccatactggggctgggtacagctactcgcctcagcccagtcggcctggcagccttggaacttctcccaccaagcacttggggtcctctccacggagttctgactggttctttaaaactcctttgccaacaatcattggctctcctactaagaccacagctcctttcaaaatccctaaaactcaagcatcttccaacctgttagccttggttactcgtcatgggcctgctgaagaacagtcgaaagatgggaatgagccacgggaatgtgcccattgcctcttagtgcaaggaagtgagaggcagcgggccgagcagcagagcaaggcagtgtttggcagatctgtcagtaccgggaagttatcagatcaacaaggaaagactcctatatgtcgacatcagggcagcacagacagtttaaatacagaacgaccaatggatatagctccggcaggagcctgtggtggtgttctggcacctcctgcaggtacagcagcaagttccaaggctgtcctcttcactgtagggtctcctccacacagtgcggcagcccccacttgtacccacatgttccttcgaacaagaacaacctcagtggggcccagcaactccgggggctctctttgtgccatgagtggccgcgtgtgcgtggggtccccgcctggcccaggcttcggctcttcccctccaggagcagaggcagctcccagcctgagatacgtgccttacggtgcttcaccccccagcctagaggggctcatcacctttgaagcccctgaactgccggaggagacgctgatggagcgggaacacacagacaccttacgccatctgaatgtgatgctgatgttcactgagtgtgtgctggacctgacagccatgaggggaggaaaccctgagctgtgcacatctgctgtgtccttgtaccagatccaggagagtgtggtggtggaccagatcagtcagctgagcaaagactgggggtgggtggagcagctggtgttgtacatgaaagcagcacagctgcttgcggcttctctgcatcttgccaaagcccagatcaagtccgggaaactgagcccatccacagctgtgaaacaagttgtcaagaatctgaacgaacgatataaattctgcatcaccatgtgcaagaaacttacagaaaagctgaatcgattcttctctgacaaacagaggtttattgatgaaatcaacagtgtgactgcagagaaactcatctataattgtgctgtagaaatggttcagtctgcagccctggatgagatgtttcagcagaccgaagatattgtttatcgctatcataaggcagcccttcttttggaaggcctaagtaggattctacaggaccctgcagatattgaaaatgtgcataaatataaatgtagtattgagagaagactgtcggcgctctgccatagcaccgcaaccgtgtgagcagcaggctcatcccgtggaccggtggtgggaacgtgaggtgatgcctttgggattacagcttgagttctgtcaccccatccccaggaaactgtagcttcttaactggtgactaccaaagaacaagcagtgatttgaaaaaggaaaaacaatccaaaaactacatatttgtaggaaatctgccttattggagaaaatcaccctttccctttttctttgtagaagcaggagcaagagtgtttggctcccagtttggacttggtgaataaatgtaccttagaactaggataatcggtacagttattcttaaagataattaaaaatgaaacaaagtgagtgctcgtcactgggttcatcagagcagtgtgtgaaattccatgtgtttgctgaggtgtaaaggtaaatgtattcacccctcatccaggcagtttgatatttggagtaagtttgtttaaatctgagcatgcatctttaaacagctcaggaagaaatagcttaagaagaagtgaaacatggatcttggaagaaattttgaaatcttcaatttgatcctaatatggatacatgttaatcttccaaaatctttcatattgcactaatttattaaaacaactgtgtattggattttgtaatttaactaaggcacaatggacttgtttaaaatattttacttgattgtatacatagaccctttccagaattcacatgtaatctccagtgaacttttaagtggttaaaacttgtattcatgtgaacctttgcacattttttttttttacttctttatctacacctacagattttctcagtaatgtttttgttagcttttggttccattttttattgtgcatgcagaatgtacattgatgcctgtgaccttaggtttattaaaggctaggtttatttgggcagtattagaaacaaaatcatggatcaagagatactcttgataatttgaatagggccaaaacaaagttggtgacctaaaggcttgttagtgatgtggagttcctacatgcagtgagtggaaaatgaagttcgttttctcttaggaaaatgggcagctgtcttctgcctaatgtgtatttttcatgttaattctgacagttcaccaaatagctagtcatggagaatgcaggcagttaacttaatatccctccaggaatggttcctacgttgtgtattatttggtttcttttacttacctgcttgaatacttgaataaaccattcaccaattttaatccttttattttaatccttttacataaaataatctgaactctttgacaaattgcacagagctctttggcattaatctaattttaatgtactgataaaaacaaacatggttgtcctttactttgacaaagtaatgtaatttttaccttatttatctgtatgaaattccagtagttaatttgaacatttatttatatgacgtttgtatttttaggtctttaatacagtgtttctacctctcatttgtaactgcatgcattattcttgaaactaggtaaaactcactgaattgttgtgtaatagcctttttattattgcctgtacaaatgtatattaaggtaaaataaaactgacaaagtgtttctagggtgtagctgggtacatattaagtggcttgttgagccaggtacttccttagtgagtttagagacttggccatgaatatcctttgtcctgccccaggatttagatcttggctactgtcatgcaggcttccaggaacatagactgttttacctccacaaccctatttgttattagtgatactttattttatataatattttttattcacagtgaaatttcattcatgttctttcagttatcacctgtgttatctcagttgtaggtttattctatcctctcctcttcctctcccatttcttttttaacacaggatgaaacaggttcagagaggggaagtgattggcctaaagtcaggaactaggcaagtggtcaagccatgctttgtgactttcaagttaattcttcttgttcttgtatattaaaggtcttggggtagatggtgtgtgtgaaacagtgaagtctcaacagcagaaaagaacaaaatgtaaattcatgaataatggttctggttatacttccattatcaaggctaattaagagattttgccttgagtatagcaataataaacaaatgctttatgtttccctg

SEQ ID NO: 2393 - DNA, 4425 bp, Homo sapiens; identical to SEQ ID NO: 770

SEQ ID NO: 2394 - DNA, 1034 bp, Homo sapiens
gtgagaaggaaactgcaagagtggggcagagaaccagagtgtcagagcaaaacctcctctatctgcacatcctggggacgaaccgggcagccggagagctgcggccggcccagtcccgctccgcctttgaagggtaaaacccaaggcggggccttggttctggcagaagggacgctatgaccgcagaattcctctccctgctttgcctcgggctgtgtctgggctacgaagatgagaaaaagaatgagaaaccgcccaagccctccctccacgcctggcccagctcggtggttgaagccgagagcaatgtgaccctgaagtgtcaggctcattcccagaatgtgacatttgtgctgcgcaaggtgaacgactctgggtacaagcaggaacagagctcggcagaaaacgaagctgaattccccttcacggacctgaagcctaaggatgctgggaggtacttttgtgcctacaagacaacagcctcccatgagtggtcagaaagcagtgaacacttgcagctggtggtcacagataaacacgatgaacttgaagctccctcaatgaaaacagacaccagaaccatctttgtcgccatcttcagctgcatctccatccttctcctcttcctctcagtcttcatcatctacagatgcagccagcacagttcatcatctgaggaatccaccaagagaaccagccattccaaacttccggagcaggaggctgccgaggcagatttatccaatatggaaagggtatctctctcgacggcagacccccaaggagtgacctatgctgagctaagcaccagcgccctgtctgaggcagcttcagacaccacccaggagcccccaggatctcatgaatatgcggcactgaaagtgtagcaagaagacagccctggccactaaaggaggggggatcgtgctggccaaggttatcggaaatctggagatgcagatactgtgtttccttgctcttcgtccatatcaataaaattaagtttctcgtcttaaaaagaaaaaaaaaaaaaa

SEQ ID NO: 2395 - DNA, 1690 bp, Homo sapiens
caacttgctccttccacaggaagctgcacctgacagaagctccaggatgcttgttctctttctcctgggcacagtctttctgctctgcccatattggggtgaacttcatgaccctataaaagcgactgaaataatgtgttatgaatgtaaaaaatatcatcttgggttatgctatggtgtcatgacatcctgctccctgaagcataaacagtcctgtgcagttgagaacttttacatccttacaaggaaagggcagagcatgtatcattattcaaaactgtcgtgtatgaccagctgtgaggacatcaacttcctggggttcacgaagagggtagagctcatctgttgtgatcatagtaactactgcaacctccctgagggagtttagttctacgtctctcctggattttgggttctttttcaaccactacgctctttttctcttccctgaacctgaattttgctctcctcttctatgcattggtagagagtgagaaagccagctcatagtgaaaagacaagcaggcataaggagacgcagtgcggacagcggagcctattgatgatggagcactagactcactctttgcacatccctgtcgctaacaggtgggaggggttttgctctccttacgtgatactgccatgaataagctcagacttggtcatttattatctcctgtatgaaaatgtgaacacttgggccataataatctccaatttgtactgagaattctgtgactatcctctatcctcatctacacacacactcctctccgttggaattctctttggattagccctgacactttctggcactgtccttttctgcccgtgggttctggagagggctaaccccagcttcccagtgtgttggcagcatgggccaagtctttctctgatagagctcttgggggaacctcagggcagaaaaaaaaaactgaacagacatagggatgagcatcaaagaaaacttcagggggcatttcaactggtaaaaactaagatctgagaaataacttgctgtgggtggaattggcttgaattatcattgccctggctggccaggcagccttgggcacatggttgaactaggtgattggattgggaacagagtgtttttttaaggatggctagtcaggttcttctcatgggactgagcaaacaaaatgctgataatgtggcaggtggtgtagtagttgaagataataggatgtaaatagataccatgaggtagtgttcaagtaacagagtgccctgtgtaagaggaagttatgagtttgcagaaagtgtgagaaaggtagcatatatgggtaacagtggtgggaagagaagaaggaagacacagaaacagataggaagagaaactgagtagcattgatgttggagcacacctgtggccaaggtggcacattttccttggatacacactaaccctggcgtttctgtccttataaggctgactgcaccctagatgacgggttgatgggtgcagcaaaccaccatggcacatgtatacctatgtaacaaacctgcatgctgcactttctttcatgtatcccagaacttaaagtaaaataaaaaaataaataaataaataaaggccagaaaaattggccaaaaaatctgaatagaaaaaaaaaaaaaaaaaaaaaaaaaaaaaaaaaaaaaaaaaaaaaaaaaaaaaaaa

SEQ ID NO: 2396 - DNA, 1223 bp, Homo sapiens
atggcgtctgcggcagcagcggaggccgagaagggatctccagttgtggtgggcctgctagttgtgggcaatatcattattctgctgtcaggcctgtccctgtttgctgagaccatatgggtgacagccgaccagtaccgtgtatacccactgatgggagtctcaggcaaggatgacgtcttcgctggtgcctggattgccatcttctgcggcttctccttcttcatggtagccagttttggtgtgggtgccgcactctgccgccgccggtccatggtcctcacgtacctggtgctcatgctcatcgtctacatcttcgagtgcgcctcctgcatcacgtcctacacccaccgtgactacatggtgtccaacccatccctgatcaccaagcagatgctgaccttctacagcgcggacaccgaccagggccaggagctgacccgcctctgggaccgcgtcatgattgagcaagaatgctgtggcacatctggtcccatggactgggtgaacttcacgtcagccttccgggcggccactccggaggtggtgttcccctggcccccactgtgctgtcgccggacgggaaacttcatccccctcaacgaggagggctgccgcctggggcacatggactacctgttcaccaagggctgcttcgaacacatcggccacgccatcgacagctacacgtggggtatctcgtggtttgggtttgccatcctgatgtggacgctcccggtcatgctgatagccatgtatttctacaccatgctctgagggacaggaggggaaggcaacatacacaccccggactcctccgcatcctcctcctgcttcctccgctgggcctggatggctgcctcacctctcacctcccaacgtccctagcccttacgtccttccacttccaagatctttttccaggttcctgagccctactgtgtctcaggtgtgccctgaaaccccagggcttgtgtgcacatatccttagcccatctttcaagggacctctccatgatcccacctcccattcacagatacctctcttgtagctctctgacctcctccttcatggcaggcatcgccattcttgctgaaccgtttgtgattgccatttgagctctggaagcctctattgccatgagagttctgtcacggtcactttactgtccccatcatcacccagcacggggctaagcatatactagatagtcaataaataa

SEQ ID NO: 2397 - DNA, 546 bp, Homo sapiens
ctgaactgggttaggtgccgctgttgctgctcgtgttgaatctagaaccgtagccagacatgggactggaggacgagcaaaagatgcttaccgaatccggagatcctgaggaggaggaagaggaagaggaggaattagtggatcccctaacaacagtgagagagcaatgcgagcagttggagaaatgtgtaaaggcccgggagcggctagagctctgtgatgagcgtgtatcctctcgatcacatacagaagaggattgcacggaggagctctttgacttcttgcatgcgagggaccattgcgtggcccacaaactctttaacaacttgaaataaatgtgtggacttaattcaccccagtcttcatcatctgggcatcagaatatttccttatggttttggatgtaccatttgtttcttatttgtgtaactgtaagttcacatgaacctcatgggtttggcttaggctggtagcttctatgtaattcgcaatgattccatctaaataaaagttctatgatctgcaaaaaaaaaaaaaaaaaaaaaa

SEQ ID NO: 2398 - DNA, 3300 bp, Homo sapiens
atggcagtagccccgcgactgtttggggggctctgcttccgtttccgggaccagaatccggaagtggctgttgaggggcgtcttccaatctcgcacagctgcgttggctgtagaagagaacggacggcgatggcgacggtcgcagcaaatccagctgctgctgcggcggctgtggcggcggcagcggcggtgactgaggatagagagccacagcacgaggagctgccaggcctggacagccagtggcgccagatagaaaacggcgagagtgggcgagaacgtccactgcgggccggcgaaagctggttccttgtggagaagcactggtataagcagtgggaggcatacgtgcagggaggggaccaggactccagcaccttccctggctgcatcaacaatgccacactctttcaagatgagataaactggcgcctcaaggagggactggtggaaggcgaggattatgtgctgctcccagcagctgcttggcattacctggtcagctggtatggtctagagcatggccagccacccattgaacgcaaggtcatagagctgcccaacatccagaaggtcgaagtgtacccagtagaactgctgcttgtccggcacaatgatttgggcaaatctcacactgttcagttcagccataccgattctattggcctagtattgcgcacagctcgggagcggtttctggtggagccccaggaagacactcggctttgggccaagaactcagaaggctctttggataggttgtatgacacacacatcacggttctcgatgcggcccttgagactgggcagttgatcatcatggagacccgcaagaaagatggcacttggcccagcgcacagctgcatgtcatgaacaacaacatgtcggaagaggatgaggacttcaagggtcagccaggcatctgtggcctcaccaatctgggcaacacgtgcttcatgaactcggccctgcagtgcctcagcaatgtgccacagctcaccgagtacttcctcaacaactgctacctggaggagctcaacttccgcaacccactgggcatgaagggtgagatcgcagaggcctatgcagacctggtgaagcaggcgtggtctggccaccaccgctccattgtgccacatgtgttcaagaacaaggttggccattttgcatcccaatttctgggctaccagcagcatgactctcaggagctgctgtcattcctcctggacgggctgcatgaggaccttaatcgggtgaagaagaaggagtatgtggagctgtgcgatgctgctgggcgaccggatcaggaggtggcacaggaggcatggcaaaaccacaaacggcggaacgattctgtgatcgtggacactttccacggcctcttcaagtccacgctggtgtgccccgattgtggcaatgtatctgtgaccttcgaccccttctgctacctcagtgttccactgcctatcagccacaagagggtcttggaggtcttctttatccccatggatccgcgccgcaagccagagcagcaccggctcgtggtccccaagaaaggcaagatctcggatctatgtgtggctctgtccaaacacacgggcatctcgccagagaggatgatggtggctgatgtcttcagtcaccgcttctataagctctatcagctagaggagcctctgagcagcatcttggaccgtgatgatatcttcgtctatgaggtgtcaggtcgcattgaggccattgagggctcaagagaggacatcgtggttcctgtctacctgcgggagcgcacccctgcccgtgactacaacaactcctactacggcctgatgctttttggacaccccctcctggtatcagtgccccgggaccgcttcacctgggagggcctgtataacgtcctgatgtaccggctctcacgctacgtgaccaaacccaactcagatgatgaggacgatggggatgagaaagaagatgacgaggaggataaagatgacgtccctgggccctcaactgggggcagcctccgagaccctgagccagagcaggctgggcccagctctggagtcacgaacaggtgcccgttcctcctggacaattgccttggcacatctcagtggcccccaaggcgacgacgcaagcagctgttcaccctgcagacggtgaactccaatgggaccagcgaccgcacaacctcccctgaagaagtccatgcccagccgtacattgctatcgactgggagccagagatgaagaagcgttactatgacgaggtagaggctgagggctacgtgaagcatgactgcgtcgggtacgtgatgaagaaggctcccgtgcggctgcaggagtgcattgagctcttcaccactgtggagaccctggagaaggaaaacccctggtactgcccttcctgcaagcagcaccagctggcaaccaagaagctggacctgtggatgctgccggagattctcatcatccacctgaaacgcttttcctacaccaagttctcccgagagaagctggacaccctcgtggagtttcctatccgggacctggacttctctgagtttgtcatccagccacagaatgagtcgaatccggagctgtacaaatatgacctcatcgcggtttccaaccattatgggggcatgcgtgatggacactacacaacatttgcctgcaacaaggacagcggccagtggcactactttgatgacaacagcgtctcccctgtcaatgagaatcagatcgagtccaaggcagcctatgtcctcttctaccaacgccaggacgtggcgcgacgcctgctgtccccggccggctcatctggcgccccagcctcccctgcctgcagctccccacccagctctgagttcatggatgttaattgagagccctgggtcctgccacagaaaaaaaaaaaaaaaagccctctctgcaatctcgcttctcgtgtccgccccgcttctcttattcgtgttaggtgcccccgccaggcattgcaggcttagtcgtggctactgttctcctgtgccgctgcatcgctctctcccgggaaagaacaggtcgtgtctcctcctagcagtgcgcgccccgcctgtgtttgcccttccagcagtgaccctcccttctagtctttatttatggtcgtgcccttccctctcctcagcccagagtgttctgcgtgggtggtgatgggggttcacctgaacacagagtgtattttcttattgaggccctgtaccttctgctgtgtgtgtgtatatataaagcaccagtctgctccccaaaaaaaaaaa

SEQ ID NO: 2399 - DNA, 10069 bp, Homo sapiens
atgaccacgctgctgtgcatgggcttctcagaccccgccaccatccgcaaggccctgcgcctggccaagaacgacattaacgaggccgtggcactgctcaccaacgagcggccgggcctcgactacggcggctacgagcccatggacagcggcggtctttccgagtctgatgagaattgtagaaggtttatggacaggtgtatgcctgaagcatttaaaaagctcctgacatcaagtgctgttcacaagtggggtactgaaattcatgaaggaatttacaacatgttgatgctattaatagaactggtcgcagagagaataaaacaagatccaattcccactggtctcctgggtgtgcttacaatggctttcaatcctgataatgaataccattttaaaaacagaatgaaagtgtctcaaaggaattgggcagaagtgtttggagagggaaatatgtttgctgtttcacctgtatcgactttccaaaaggagcctcatggatgggttgtggatttggtaaataagtttggagaattaggtggatttgcagcaatccaagccaagctccattcagaagatatagaacttggggctgtctcagcactgattcagcccttaggagtgtgtgcagagtacctcaattcctccgtggtacagcccatgctagacccagtcattcttactacaatccaggatgtacggagtgtagaagagaaagacctcaaagacaagagattggttagcatccctgagctcttgtctgccgttaagttactttgcatgcgcttccaaccggatctggtgacaattgtggatgaccttcgactagatattctattgcgcatgctgaaatcaccacatttcagtgctaagatgaattctctcaaagaagtaaccaaactaatagaagatagcactttatccaaatctgtgaagaatgctatagatacagacagattattagattggctagttgaaaactcagttctgtcgattgcactggaaggcaacatagaccaagcacaatactgtgaccgtataaagggaattattgaactcttgggtagtaaattgtcgttagatgaactcactaaaatttggaagatacagtcaggacaatcatctactgtgattgagaacattcatactattattgctgcagcggctgtgaaatttaattcagatcagcttaatcatttgtttgttctcattcagaaggttttagacgtactctgggaactggctcaccttccaaccctgcccagtagccttattcagcaggccttggaggagcacctgacaatccttagtgatgcatatgcagtgaaagaagcaatcaagaggagctacatcatcaagtgcatagaagatattaagaggtcatctcagcttaataatccccagtttgtatgggtggtaccagctttgcgtcagctccatgaaattactcgctcattcataaaacaaacctatcaaaagcaagacaagagcattattcaagacttgaagaagaattttgaaatagtgaaattggtaacgggaagtttgatcgcttgtcatcggcttgcagctgctgtggccgggcctggaggcttaagtggctcgacactagtggatggccggtacacttaccgggagtatttagaggcacatctaaaatttctagcgtttttcttgcaagaagctactctgtatctgggctggaatcgtgccaaggagatctgggagtgtcttgtaactggccaggatgtttgtgaattagatagagagatgtgttttgaatggtttacaaaaggacagcatgatcttgagagtgatgttcagcagcagctcttcaaggagaaaattcttaaattggagtcatatgaaatcactatgaatggttttaacttatttaaaactttttttgaaaatgtgaatctttgtgatcatcgattgaaaagacaaggagctcagttgtatgtagaaaagctggaattgataggaatggatttcatttggaaaatagccatggaatcacctgatgaagaaattgctaatgaagctattcagctaatcataaactatagttacattaatctaaatcctagattaaagaaggattcagtatctttacataagaaattcattgctgattgctacacaagattagaagcagccagttcagcacttggtggccccactctaacacatgctgtgaccagagcaacaaaaatgcttacagcaactgccatgccaactgtagcaacctcagttcagtctccttatagatctactaaacttgtaataattgagagattgctgcttctggcagagcgctatgtgatcactatagaggatttttactctgttccacgaactattctacctcatggtgcctcatttcatggacatcttttaacccttaatgttacctatgagtctaccaaagataccttcactgtcgaggctcacagtaatgaaaccatagggagtgtccggtggaaaatagccaagcagttgtgctctcctgtggataatatacagatatttacaaatgatagcctgctgacagtgaataaagatcaaaagctactccaccaactgggcttttctgatgaacaaatccttacagtgaagacttctggcagtgggaccccatctgggagttcagcagattcttcaaccagctccagcagcagcagcagtggggtttttagttcttcatatgccatggagcaggagaaatccctccctggtgtagtgatggctctcgtatgtaacgtatttgacatgctttatcagctcgccaatctggaagagccaaggataactctacgagtacggaagcttctgctcttgatacccactgatccagccattcaggaagcccttgatcaacttgattctttaggaagaaagaaaacattgctgtctgaatcaagttctcagtcctcaaaatctccatccctgtcatcaaagcaacagcaccagccaagtgccagttcaattttagaaagtctgtttcgatcttttgccccgggaatgtctaccttcagagtgctctacaacttagaagttctaagctccaaactcatgccaacagctgatgatgacatggccagaagctgtgccaaatccttctgtgaaaacttcctcaaagctggcggtttgagtttggttgtaaatgtcatgcagagagactccatcccatcagaagtagactatgaaacaaggcagggtgtttattccatctgtctacagcttgcaagatttttacttgtcggacaaacaatgcccacgttattagatgaagacctcaccaaagatggtatagaagcactttcttcccgcccattccgaaatgtcagccggcagacaagcagacagatgtccttatgtggtaccccagaaaagtcatcctaccgacagttgtccgtgtctgataggtcttctattagggttgaggaaatcatccctgctgctcgagttgcaatacaaacaatggaagtaagtgatttcacttctactgtggcttgcttcatgagattgtcatgggctgcggctgcaggacggcttgatcttgttgggagtagccagccaattaaagaaagtaattccctgtgtcctgctggaattcgaaacagactcagcagttcaggaagcaattgcagctctggaagtgaaggagaaccagtagccctgcatgcgggaatctgtgttcgacaacagtctgtatccaccaaagactcgctgattgcgggagaggctttgtctcttcttgttacgtgcctacagcttcggagccagcaactggcatctttctataacttgccctgtgttgctgatttcatcattgatattctgctcggatcaccaagtgctgagattcgccgggttgcctgtgatcagctgtacactcttagtcagacagacacatcagcgcatccagatgtgcagaagccaaatcagtttcttctaggcgtaatcctcacggctcagctgcctctctggtctccaactagtattatgagaggagtcaatcagagactgttatctcagtgtatggagtattttgatttgagatgccagttattagatgatctgacaacttcagaaatggagcagttaaggatcagcccagctacgatgcttgaagatgagattacttggctggataactttgaacctaatcgtacagctgaatgtgagaccagtgaagcggacaacatcttactggcagggcacttacgcctcatcaagacccttctttcactctgtggggcagaaaaggaaatgcttggttcatcactcattaaaccattgttagatgacttccttttccgagcttctagaattattttaaatagtcattctccagctggcagtgccgccatcagtcaacaggactttcatccaaagtgtagtacagcgaatagccgattggcagcctatgaagtccttgtgatgttggctgatagttcaccttcaaatcttcaaattattataaaagaactgctttctatgcatcaccagcctgaccctgctcttaccaaggagtttgattaccttcccccagtggatagcaggtccagttcagggtttgtggggctgagaaatggtggtgcaacttgttatatgaatgcagtcttccagcagctgtatatgcaacctgggctccctgagtcattactttcagtggatgatgacacagacaatccagatgatagcgtgttttaccaagtgcagtctctctttggacatttaatggaaagcaagctgcagtactatgtacctgagaatttttggaagattttcaagatgtggaataaagaactttatgtgagagaacagcaggatgcatatgaattctttactagtctcattgatcagatggatgaatacctcaagaaaatggggagagaccaaatttttaagaatacatttcagggcatctactctgatcagaagatctgtaaagactgtcctcacagatatgagcgtgaagaagctttcatggctctcaatctaggagtgacttcttgtcagagtttggaaatttctttggaccaatttgttagaggagaagttctagaaggaagtaatgcgtactactgtgaaaagtgtaaagaaaagagaataacagtgaaaaggacctgtattaaatctttacctagcgtcttggtaattcacctaatgagatttgggtttgactgggaaagcggacgctccattaaatatgatgaacaaataaggtttccctggatgctaaacatggagccttacacagtttcaggaatggctcgccaagattcttcttctgaagttggggaaaatgggcgaagtgtggatcagggcggtggaggatccccacgaaaaaaggttgccctcacagaaaactatgaacttgtcggtgtcatcgtacacagtgggcaggcacacgcaggccactactattccttcattaaggacaggcgagggtgtggaaaaggaaagtggtataaatttaatgacacagttatagaagaatttgacctaaatgacgagaccctggagtatgaatgctttggaggagaatatagaccaaaagtttatgatcaaacaaacccatacactgatgtgcgccgaagatactggaatgcctatatgcttttctaccaaagggtgtctgatcagaactccccagtattaccaaagaaaagtcgagtcagcgttgtacggcaggaagctgaggatctctctctgtcagctccatcttcaccagaaatttcacctcagtcatcccctcggccccataggccgaacaatgaccggctgtctattcttaccaagctggttaaaaaaggcgagaagaaaggactgtttgtggagaaaatgcctgctcgaatataccagatggtgagagatgagaacctcaagtttatgaagaatagagatgtatacagtagtgattatttcagttttgttttgtctttagcttcattgaatgctactaaattaaagcatccatattatccttgcatggcaaaggtgagcttacagcttgctattcaattcctttttcaaacttatctacggacaaagaagaaactcagggttgatactgaagaatggattgctaccattgaagcattgctttcaaaaagttttgatgcttgtcagtggttagttgaatattttattagttctgaaggacgagaattgataaagattttcttactggagtgcaatgtgagagaagtacgagttgctgtggccaccattctggagaaaaccctagacagtgccttgttttatcaggataagttaaaaagccttcatcagttactggaggtactacttgctctgttggacaaagacgtcccagaaaattgtaaaaactgtgctcagtactttttcctgttcaacacttttgtacaaaagcaaggaattagggctggagatcttcttctgaggcattcagctctgcggcacatgatcagcttcctcctaggggccagtcggcaaaacaatcagatacgtcgatggagttcagcacaagcacgagaatttgggaatcttcacaatacagtggcgttacttgttttgcattcagatgtctcatcccaaaggaatgttgctcctggcatatttaagcaacgaccacccattagcattgctccctcaagccctctgttgcccctccatgaggaggtagaagccttgttgttcatgtctgaagggaaaccttacctgttagaggtaatgtttgctttgcgggagctgacaggctcgctcttggcactcattgagatggtagtgtactgctgtttctgtaatgagcatttttccttcacaatgctgcatttcattaagaaccaactagaaacggctccacctcatgagttaaagaatacgttccaactacttcatgaaatattggttattgaagatcctatacaagtagagcgagtcaaatttgtgtttgagacagaaaatggattactagctttgatgcaccacagtaatcatgtggacagtagtcgctgctaccagtgtgtcaaatttcttgtcactcttgctcaaaagtgtcctgcagctaaggagtacttcaaggagaattcccaccactggagctgggctgtgcagtggctacagaagaagatgtcagaacattactggacaccacagagtaatgtctctaatgaaacatcaactggaaaaacctttcagcgaaccatttcagctcaggacacgttagcgtatgccacagctttgttgaatgaaaaagagcaatcaggaagcagtaatgggtcggagagtagtcctgccaatgagaacggagacaggcatctacagcagggttcagaatctcccatgatgattggtgagttgagaagtgaccttgatgatgttgatccctagaggaacatgcccagcctgagaggagtcaagacacaatactggatgctcagcaccttcttggaatcagaatctcgaaccctttggaagagcctggagattggactgggaaagctgctgtgacttgggcggatcgtgtatttctcaaggaaagcatttttaagccactagaaggtttgggagctgtttggcagtgggagaactccggcatgtggatcagctgtcccgggagcgtggtctatatgtggattcacatttctgtggagattttcggaaatagagccagtggcagacttttttgttacacgaacatacaagagtgagcataaagctgttgctttctctacgatgctacaaaagaaattcctttggtttttatattttaagaaaaagcaagctgcttttagatatgtgggggcaaatttttaatcttgcagtaatattaaacaggaatatccaatttaaaatgatgtaaagatgtaataaaattccttttcattgtaaaatagtaattaagtcaatttacacagacctttgtatttaatatgtctccctatttgtatagaatttcagatgggtctagatgagaaccctatgcataagcttggatcttgatgaaaggttaccaggatcaggatcaaaaattgggaaatactaagctcttgaagatatttttctgatataattagattgaaaagagcaattttgaaaatgctgtgttctccagaagtacagggtgcattatttgacatcaattacttaaagaagttatgagttgttccccaaacagattttaaaaacagcaaaataaaagcactttaagatataattttactgagtttaacttcacagaattatctttttaatgcttggagacatattgaataaactgtagtcttaaatcatgtgatctgcaatcgtttgcttttgcttaaaacataattactgaaacccttggtattggttgtatatgaagttaactatttgagttggtacacactgcttgtgagtttcatagttattgtaatgcagagaaggaatttgagaatttgtttctcctcaacatgactaattaacactgaaaagtcagtcaaggtttaagatttattttcccagaaataaatataaagcaattgaataaccatccatttagtcgtatttccaaagtatagcaccattcactcatttataccagctcccttttatggtgtgggggagaggtttacacccacatatttcatatatattttgtacattttgtattttgaattgctcacattttcggccctgttttgcctttagttacaggtcctgccttattttcatctcaccatgcacagaactagggagccttaggaagtgccaggttttcactgtcagatttgccaagtcacagaggcgcagccagccctgaagtgcctgtctggctgctgtggcattgtgtgggcatgtggccaggcagatggcatctcattactgtgctctcgccatggcccagtcttttcattctctggcagtgagggtttctgtgctgtcagacttcattgttattctgtgacttgctggaggttggcagtggcctttgtcaaacacactgagaagatggaagggccagcacttaagagcagaactgtacccttagagaaacggacagaggcgagtggcaaacttcagacggttccaatggtcttgcagtttgaaatgtgatgttctaccattggttttgagtacgtgaatacttcctgtcctactgtttcccctaccctattctcaccttctctccgcccacatcctcaccaagagattgtgtgggacatgaccttgaaatgctggcgatgatccacactgggatatcatcgctggcgactgcactctcaggagcccaaaatcaggagtgaaattgccacttctagtccccttatttcctatggaaacaacgccttccgcacccctagcacctgccgtcctcactgtaaagcttcatcaggatcgtccaccgtgtatattatacgcttcagatcatgttgcttatattgttgctgcaatgaccatcgttttcactttgctggtaaccacttgattgctgacagctacagtcaatgaacctgctgatgactttttttaatgtagtacaacagtgacagttatgacaggcttaccttggaagagttgtcatttttactgccaattttttggatgaagatgtttttataaacctttcaaaatggtctgcaaacagagcaggaattgcacaattaactcaataatgctgtgtgttctcaagaagctcccttagtgaggccgatcttaagatggccgattctgcccgttgaaggcatcctgggaaagaaaacaagcatcccagcgggcatctcaccacgacttctcctggagtcctcacacggtcactgacaactacagtcagttttaggaactagagtgccgtatcatcagacttaccctgtcctgccccaccttccctgctaacatcgaggtgtgtgcagttaccttctgagcttggaacaagcagactggaattttcctctgctacctcttgtgtataaaatcttgtttataaaatttcaaaaggaagtagatacactagggaagaaccttaattctaaatttggttcatgtgtggcaaagttcttagcttctaagagtataaaataaatttttcaaaaacaga

SEQ ID NO: 2400 - DNA, 3766 bp, Homo sapiens
tgcggccgcaggttccgctgtctcgggaaccgtcgtatccctcggtccggcggcggcggcggcggtagcggaggagacggtttcaggcctccggtgcggctgcaatgctgagctcccgggccgaggcggcgatgaccgcggccgacagggccatccagcgcttcctgcggaccggggcggccgtcagatataaagtcatgaagaactggggagttataggtggaattgctgctgctcttgcagcaggaatatatgttatttggggtcccattacagaaagaaagaagcgtagaaaagggcttgtgcctggccttgttaatttagggaacacctgcttcatgaactccctgctacaaggcctgtctgcctgtcctgctttcatcaggtggctggaagagttcacctcccagtactccagggatcagaaggagcccccctcacaccagtatttatccttaacactcttgcaccttctgaaagccttgtcctgccaagaagttactgatgatgaggtcttagatgcaagctgcttgttggatgtcttaagaatgtacagatggcagatctcatcatttgaagaacaggatgctcacgaattattccatgtcattacctcgtcattggaagatgagcgagaccgccagcctcgggtcacacatttgtttgatgtgcattccctggagcagcagtcagaaataactcccaaacaaattacctgccgcacaagagggtcacctcaccctacatccaatcactggaagtctcaacatccttttcatggaagactcactagtaatatggtctgcaaacactgtgaacaccagagtcctgttcgatttgatacctttgatagcctttcactaagtattccagccgccacatggggtcacccattgaccctggaccactgccttcaccacttcatctcatcagaatcagtgcgggatgttgtgtgtgacaactgtacaaagattgaagccaagggaacgttgaacggggaaaaggtggaacaccagaggaccacttttgttaaacagttaaaactagggaagctccctcagtgtctctgcatccacctacagcggctgagctggtccagccacggcacgcctctgaagcggcatgagcacgtgcagttcaatgagttcctgatgatggacatttacaagtaccacctccttggacataaacctagtcaacacaaccctaaactgaacaagaacccagggcctacactggagctgcaggatgggccgggagcccccacaccagttctgaatcagccaggggcccccaaaacacagatttttatgaatggcgcctgctccccatctttattgccaacgctgtcagcgccgatgcccttccctctcccagttgttcccgactacagctcctccacatacctcttccggctgatggcagttgtcgtccaccatggagacatgcactctggacactttgtcacttaccgacggtccccaccttctgccaggaaccctctctcaactagcaatcagtggctgtgggtctccgatgacactgtccgcaaggccagcctgcaggaggtcctgtcctccagcgcctacctgctgttctacgagcgcgtcctttccaggatgcagcaccagagccaggagtgcaagtctgaagaatgactgtgccctcctgcaaggctagagctgatggcactgtctgcactgtccaggaaaaaagtaaaactgtactgttgcgtgtgcaagcggccccactagagccttccagccttctggtgtgttctaagagcaggctccacctgggagccagccccagttcacaccaaaccaggctccctgaacagtcctgttcatgtgtgtaggtggttctgttgtgttaagaaagcattcattatgtccggagtgtctttttactcatctgatacaggtaattaaaagaactcagattcttgaagccaccgttttcatattgtaatgttaggtgttctcagaggggaggtacctttgtctaatcaacgtttccacttagatcttttatttttaataagcaggcccataaaaattgttgacaagaattaatgaaattattaaaggcaacaatttagaagaaaaagtgcctttcactttcgattgcttttgtagcacgtccattgtgaaatattccttccaggctactcaaaggatagcaagagaacaggtaaatgatgcctaaagaacaccttcctttttctatgccttttctaatctttcaattctttctatggagtaaaggctcatctgccaaatctgccccctggggaaactctttcactactttgtcagttataagtgaagagcttacttgttgcttttatcttttgtatattggactgagatgtaattacactgtattataaaactctgtgaatagccagaactgagctggatctttgcaacacctgattcctctgctctgtggaaaactttttcttacacaaggatccactgtggacggttactttcatctgtttatttattgcccatgcagagctcttaaggtttacaggtgggagcttggggctgtataaaaaaataatccctgccctgagttgacacctggcttaggaaggaagggctgactatggggctgcagtctctctgaacctcagtttcctcatttgtgaagtgaagggttagatttgatgaccaccaaagttcagcccttttcacgaaaaggagaaagcagcttttgactttttaaaaaacatataactacagctggcatctagtattgtcatgttgctctaggtccatattctgaatttattcatttccaatagcctaatacaaaaagtatatattgagcactttcttcccttttcaggtaagtctctgaatgcagcccagggccaaaggaattttgatgacacagtagtacctatgttttaagctatatttttaatttagaaaaatggataccaaattcaaaccgactcatcagaggtaagatttggaatcagacctttccaaaaggtcatctgaggtaaggctaagaccgcacttcctctgctgggggtgagctggcagacacaccaaacagtgccttggcagcagctcacagtgcaggaagcccaggtgatcactcttctgctgggcccaggctgcaccctgaggactcagtaactcactctcaacagaatattctgtgcaggctctccaggctctgggcgtcagggtgcaaggggcagcttgaactgtacggtccgtcctgcactcacccgatgcagaccttgactttgatgttgaaatgaacacacttgttttacccaagtctggtggaacaaatgcccaatcatgtgaccttaaagtgtactgcaaagctgtagctttaagtaattgctgttctgccactgcttactctgaaatctaccatcaaagaaagatagagaaaaggggctgagccttggaatatatggttataagcagatctttctttggtcagagaccagggtttgagccaaggctgtaaatgtgaacaatagctgtgcaaagccttttaacctgacttcttcattttgtaaattattatgcattaagtagcagcccaataatctgatttctagttttattttcaaagtaagtagcttcttttgggaaaaacctaagttaaactagtagttttgccataataactgctgatttatgtatttgctaaaggtacttttgtatctgctgtgtattatagcaataaaataatcattttgttagaaaaaaatcaaaaaaaaaaaaaa

SEQ ID NO: 2401 - DNA, 10698 bp, Homo sapiens
atgtccaaggtaacggcgcctgggtccgggccgccggcggcggcgagcgggaaggagaagcgctccttcagcaagcggctgtttcggagcggccgcgctggcggcggcggcgcggggggccccggggcgtccgggccggccgcgccttcctcgccctcctcgccctcctctgcacgctcggtgggcagcttcatgagccgcgttctcaagacgctgtccacgctctcgcaccttagctctgagggcgccgccccagaccgcggcggcctccgcagctgcttcccgcccgggccggccgccgcgcccacgccgccgccgtgcccgccgccgcccgcctctcccgcgccgcccgcttgcgccgccgagccggtgcccggcgtggcggggctccgcaaccacggcaacacgtgcttcatgaacgccacgctgcagtgcctcagcaacaccgagctcttcgccgagtacctggcgctgggccagtaccgggcggggcggcccgagccctcgcctgacccggagcagcctgcgggccgcggcgcgcagggccagggcgaggtcactgagcagctggcgcacctggtgcgggccctctggaccctggagtacaccccgcagcacagccgcgacttcaagactattgtgtcaaagaatgcactgcagtaccggggaaattcccaacatgatgcccaggagtttctgctgtggcttttggaccgagttcatgaagacctcaaccattcagtgaagcagagtggccagcctcctctgaagccaccatcagagactgatatgatgcctgagggaccatctttccctgtctgtagcacttttgtacaagaactctttcaagcgcaatacagatcttctttgacgtgtcctcattgtcagaaacagagcaacacttttgatcctttcctttgcatttctttgccaattcctctgccccacacaaggcctctctatgtcactgtagtgtatcaaggcaaatgttctcactgcatgaggattggtgtggccgtacctctgtctgggactgtcgccagacttcgggaagcagtgtctatggaaacaaagatccccactgatcagattgtgttaacagaaatgtactatgatgggttccatcgttccttttgtgatacagacgacctggaaacagtccatgaaagcgactgcatttttgcctttgagactcccgaaatatttaggcctgaaggaattctcagtcaaagaggaattcatttaaacaacaacctaaaccacttgaaatttggcttggattatcatagactgtcttctcctacacaaacagcagcaaagcaggggaaaatggattctcccacatcaagagcaggcagcgacaagattgtcctgttggtgtgtaaccgagcctgcactgggcaacaagggaaaagatttggactgccttttgtgctgcacttagagaagacaatagcttgggaccttctgcagaaggaaatcttggagaagatgaagtatttcttgaggcccacggtttgcattcaggtgtgtccattcagcttgcgtgtggtcagtgttgttggaataacatatttgctgccccaggaggagcagcccttgtgccacccaatagtagaaagggcattaaaatcttgtggaccaggtggcactgctcatgtgaaattagtagtcgagtgggacaaggagacaagagatttcttatttgtaaatactgaggatgagtatattcctgatgcagaaagtgttcgtctgcaaagggagcgtcatcatcagcctcaaacctgcactttatcccagtgtttccaactgtacaccaaagaggagcggcttgcccccgatgatgcctggcgttgcccacactgtaagcagctgcagcagggaagcattacgttaagcctctggactctgcctgatgtgcttattatacatctaaagagatttcggcaggaaggagacaggcgcatgaaacttcagaacatggtcaaattccccttgactggcctggacatgacacctcacgtggttaagaggagccagagcagctggagtttgccatcgcattggtccccgtggagacggccctatggactcgggagggaccctgaggactacatctatgacctgtatgctgtgtgcaatcaccatggcaccatgcaaggggggcactacacagcgtactgtaagaactctgtggacggcctctggtactgcttcgatgacagcgatgtgcagcagctgtcagaagatgaggtctgcacgcagacagcatacatcctcttctaccagaggcggacagccatcccgtcatggtcagccaacagctcggtggcaggctccacaagttcttccctgtgtgaacactgggtgagccggctcccgggcagcaagccagccagcgtgacctctgcagcttcctccagacgcacctccctggcgtcgctctctgagtccgtggagatgactggagaaaggagtgaagatgatggaggcttttcaactcgaccatttgtgagaagtgtccagcgtcagagtttgtcatccagatcttctgtcaccagccccttggccgtcaatgaaaattgcatgagaccttcatggtccctgtctgctaagctgcagatgcgctccaattctccatcccgattttcaggggattcgccaattcacagctctgcttccaccttggagaagattggggaggcagcagatgacaaggtctccatctcttgctttggtagcttgcggaacctttctagcagttaccaggaaccaagcgacagtcatagtcgccgtgagcacaaggctgtgggccgggcccctctggctgtcatggaaggcgtgttcaaagacgaatcggacacccgcagattgaactccagtgtcgtagatacacagagcaaacattcagcacaaggggaccgcctgcccccgctctctggtccatttgataacaataatcagatcgcttatgtggatcagagcgactccgtagacagctctccagtcaaagaggtgaaagcccccagccacccaggctcactcgcaaagaaaccagagagcacaactaagagatcccccagttccaaaggcacttctgagccagagaaaagcttgcggaaggggagaccagccttggcaagccaggagtcatccctttcaagtacatccccttcttctcctcttcctgtaaaagtctctctaaagccctcccgctcccgcagcaaagcagattcttcttccaggggcagtggacggcattcatcccctgcccctgcccaacccaaaaaggagtcatccccgaaatctcaggactccgtgtcatctccttcgccacagaagcagaagtcagcctcggccctcacctacactgcttcctccacatctgccaaaaaggcctcgggccctgccacaaggagccctttcccacctgggaagagcaggacttcagaccacagcttgagtagagagggctccagacaaagcttgggttctgacagagccagcgccacctccacctccaaacccaattcccctcgggtgagccaggcccgagcaggggagggcaggggggccgggaagcacgtgcggagctcctccatggccagcctgcgctcccccagcacaagcatcaagtctggtttgaagagggacagcaagtctgaggacaaggggctgtccttcttcaaatcagccttgagacagaaggaaacccggcgctcgacggatcttggcaagacagccttgctctctaaaaaggctggtgggagctctgttaagtctgtctgtaagaacaccggggacgacgaggcagagagaggccaccagcctccagcttcccagcagccaaatgcaaatacaacgggaaaagagcagcttgtcaccaaggaccctgcttctgccaaacattccctgctgtccgctcgcaaatccaagtcttcccaactagactctggagttccctcgtctccgggtggcaggcagtctgcagagaaatcctcaaaaaagttatcttctagcatgcaaacctctgcacggccttctcaaaaacctcagtgatatttctgcaatcaaagtgttttatctgtaaagatgtttatttatttagaacccctgccctcccaccaaagcctcctgtgcttttgttttgtacttttttgagtcacgtgcccgactgtgtgtgtgtgtgtgagtgtatgcgtgtgtgtgtctaattcaattgcaaattgttcaaagcgtcgccttattctgccattgaaccaaataacagccataggcaaaacattgacaccaagctaactggaataattgtagacgatacccaggacggtccctttagcaattgtacatatttctttctagagaactctaatgactttctttggatatgagggttttgaaacctgtgaaccagaaaagctaccattagtgcgtagaaggaggaaggagctgactcgtgtttcttctgagcaggacttgtccttactgtggattgtgggtggcaccaggagctctaaaaactgtgactctaacaacgaaacaaatcgagggaaaaactcttgctttctgcactttcgccccatctaccagtctttgtaaagggcaatattttaacactaatgtttctcaggtatatactcagctagtctaggatggttgcacaccagtaaatggattaaagaggaaggtgccatgtgggtgactgtgtcatttctcctactgccacagatagacattttcgaggtagaaatgaagcctttcaccaccttcctatctgtggtgacatgtgcaccaaaacctgtcttgactcttgggataggtcctaggaagtggcagattggatagccagaaagccagtcactcgtttaattttttttccttctgaaattactagctaaggctcttggaattttgcactgtagtagagcagttaacacctttgacagattcctggaaaaaacttctagattctaaactgggtgaaagactggacatcattttccttgtcaggtgttgcatttttccgttagaggtgggaagctccacgatgccctgtgtctgtgggctcatgttccctcatcttgtagcttggagaggaaagaagttgccttctgccaaaagccaatggtggtatgttgaagcgttgtgtgatcaagtgttacatatgcacttcagatcctgtctgtcagtctctgttagggctgcctttcagtaactcatttattatttcttctttgttcttaagatttcatctcatgcccagaactcacaagcaggttttggagtgtgttccatctggccgtgtcagtgcaaattgcatttcttacaaaggagaacctcaccaaaaaaaacctcacagataagcaaagtatatagttttgcaagctttttcaaggtctcctggcaatactttcctgctcaatttttagcttttcttttttttttaaatgtcaagagagtgaaggtcttgattctctctgaatagcatttgtcactttgccagtaaatacagcatgctaagtttatgtgcttttaaatattagcgtttttcgtcagactcttcaagttcttcttgaacccttggtgcacagatccatatataacctcccttttcagtattgctgtgtgtgaattaactacaacacatatgcatgcatagctgtgaattctgcactactttttttttcttttttccccccaagaatatctcttgggaaaagtttttagtacgttacttaactttattttgctgctaatttgcgcattagccggtaacttgcaagtctggagaccacttactgttgagggtagctggaattttagacccttggcagtatttaagatttagacatttagccttgtgaaagttaccacagtgctccatgtgattcattgactgtgagcctgttgtccattgcactcagccctgtactcacttcttcactcgctgtcctggttttactgttcagattttggtgggttctcaaagcagtaccactctcatctgctcagtacatctgcggcaactggctgccttcgatgctgtcattgcgttcagcccagcacatcacagccccatcagtgtgtagccaccgctctcgtttttctgtatcgcttttatctcctgaaaaagatgcaccaaataagagatcatctatatcaggaattgaatgtctaactcaaacctctcatttttgtttaataggtagatctcatttgaagtctcctatctgaatctctgaaacaattatagtttgattagacaaaggtttttaataacacttcttttttgctgtagtcaagcattaatagaaactagtttaattttcacagtggtaaatatttttattcttgagttatctaggaatggattttccacgatgtctagtgacttaaaaaaaaaaaggaaaaacgtttctacaaatccctttggttttccatgggatctggaataaaatgtcagtgtctataaactgtatgtcatggagtttagtccttgtttcaggtttaatagaaaaaatcaggaagtatcatggcattgtctagacatcatgaagctattttatttccatagttggtaaacagtgaaaatttcattatctccaactactaggtacaactttaggccacaggaaaggttatttggcccgaaagtttggaggtgctccttgaggtgggaagtatcttgtgggaaagtagttacttgattcaatttagttcattggtagggttggggacttggtgttggtttctttctttcttttctttttttttttttttttaattttcccagcaatatttagcacaatgagcgtgtatgtgctttggggttaaaaattatctgctagggatgataggcctgggtttctcgttgacatctagatgggcctgattagagcagtcatctcctggtaggcacaaaataatcaccaacagtaatgttgtatctgtaatgtttgtttgctttttaaagttttattcttgatttcttgtaaacatccattgcactgaggccgtatcattccttaagacagccctacatcttgccttggtaatcccttagataatgtggaaactcaaaccgttaggctccagtcatcttagaccatttcccatccgttttgtattttctcgtcctgaaagcagctgaactgaaagtaagtaataatatgctggaccagtgggaacggatgtgggagtatttgtggtgtgctaaaatactgtaattatctgtgaggctgcctgacacgcttttgcaatcttgttttcatcattcattctgcaaacgtttatggagggccttctttgagcacagaggcaaaactgaaagcttcagggatttgctgtagctgaggagccctgggagcacagcccatcaagcaagggatgtgatggtgtcctaaatggagtgacagttctcctgggaaaagagatcacgtggattccggtcaaatcggctaaggcttgtggttctcttgagcaagtctgttccttctggaaaccaaaagtgcccttcatctttagagacattttactcttccatccaccttttcagactgagctgtctctactatttaggggttgaaaatccattacacagtcactttacgttaacattgggtcatcttatgtttgtatgagacggatgtgggatttgaggggaacattgtcattcccttaaaataactatcatgaaaaaaatagcaacagtatgtaaagggaccaagagtggcagcctttagggaaaatggagcagagaagagctgtgaacaaagctcatttatttgaaataagcgtgctttatttcacatagaggggcatcagacgttacatttcattcggacaaattactgaacagccgaagtgattgtttccaatgtaggttattataattattggatacaaagatttaactagtgtttctgggttggatttttgaaatagtatgcaagtcataagcacagtttcaataaaacacgtattctggaggtgcgtggaactttgtattatttgtagttgagaaaggcaaactttgctgacaaaccagtacctatcacaaacgaacacaaaaagtagctgttactgtgcaggctgtctttaactttcatttcataaagggtacattattgttaaactctactacatggtttggggagaaatccagtggttttatttaaatgaacactctcacactgccttttgatcaactttcaaagtattttgcagatgcattttgagcatgaccatttttttccccaagtaaaaacaattgtgcgtggcctccatataactcagaaagcatgctcttactacctatgcaagcaaacaataaaacatatagacatgaaatgttaagtcttaaaaaaaaaaggcaacaattatggagctctatttttaaatttgtgattttcaaaatatggcttactcatcattgtgtagaagagcatgaatgcgatttcttgttttgctctgcatatatttctctgctgtttttctgatcattggcgagattgtaaagtattttgcaagcagaagtggaattggatatgttgaacacacatcattggtgtacatactgtatttagcctgaagactttcctaaagtgttttgttctaaaaataacctgccattttctatagattttaattttttatatcttcaagggttctattttggtcacaaggaaagaatgtggcttctaatagtgctaagaattaaaagatgcttttatagagacttagagctattttgaaaagctttggggcttcccagccactgatcacaattagactaagcccatggaatttctgggagtgttgtgcagtggattcggttctagatccatcttacatttgtttagtgtttcccaatttttgggagaaggggtgcacagcaaatttgagagacttttttgaatctcacacatgtattttcctcaagattcttttaagcctcttctgaatgacttgtctgagatagtgaagacccacattaactagaatcagctggggaactttaaaaaatacagtgcctgggtcccagtccctagcttttgatctaattcatgtaggggtgggatccaggaattaccatgtattttaaaagcttctgggtgtttctaatttgcagacagattgagaaccactatgatacgtcatccctttactgagaattatggcgagaatcactgccatttgaattactcaggagtgactgattcctcagttgtgtaggagaagcagaaaaaataagaataaaaagaattgagagatactgatatcaaactcccatttgaaatacaagggcccttctgattcaaggcccagttggggagcttggaccatgttgtgaatggcctagcactcgccagtctggtggaaattggtggtcttagttgctggagcaggctgagtgtccccgcggggtttgcatctgtccccagaaccttttccccaggcccgtgggggaatagggaagtcactctgagctagaaattgtcgaagaagaaaagaaacaaccttcctagccttggaaagcctgtccctgcttttgatagaattattgcctttttgtaggaattacagtagcaaaccccaggctgccgctgaatttcctacttttgctcattctctaggatagttcttatccagaatgtggtttcaggaattcttttttttagtttgaaaatgaatgtgaaacattttctttggtgtcttttttttaaaaaaaaaaaacccttattgctattttttcgtgtttttgttttgttttgttttttgtttgttttaccattaagtaatacacatcccagaatttggcactctgtgttaactgtggaggcaaataaaatttagttttaatctgtggtgagctgaatgcactacaacaccttcgaagtaatctgatggtttcattctgtcgagcctcatgctgcctacaaaacaccacaatttacctggtgttttcaacattttaaggaatgaagatacaagtagacatgcaagttggaaatgtttctttagaaaggccatccagaataatgatatctgttgcagtcgtccaaatgcaatatgaaatttcctaggtgctattataaacggtgtggtgtcataccaaatgcaaaagcagttacagtatttccgaagttggagttctctttgtaggcctttcaaatacgtgtttgcattccatagaggtctgctcaccaactgtgcctctcaccactggttaaaattgaatttaagcctcattgacataagtcgtttcttgattgaactcttcagtttttacactggaatttctgtagttgtcttgaaagctgcatgtcacatcactgtacacaaagtgctttggtattactcatgcaccgtggatagtgatttctgtgtcgttttcattttcagttgtacagtaatatggaaggcaggatgtctttcctagaggctggaagaaaagtgtatcgtacattttaaatttattttagaacaagtgcatgagatgtgtcactgatttctgttatttatttgtatgttttattattcaaagtgtatgcacttttaagaagcagaatttatatttttacgtttgaaacgttttatttctgaaacagcgttgattatatagtatacagttggaattaagagaaaagtggaaaatgtaacaaaatacaataaatttattacaagatgtcctcttca

SEQ ID NO: 2402 - DNA, 5234 bp, Homo sapiens
agcgcagcgcgaacgctgggtgcggcgcctttaagcgtcgcggtgacacgtgtgtgaggcgccggaggcccggatggtgcgcgtgctgggccgcgggccgaaggagtcgccagggctgcgtaggcttgtggcgcgcccgcggagaggccggggctctgacgcccgctctgcggcttcggtgtttgaacaggccacagtccaggagcgcttacattcaggagctccgcgtagcacctgcccaaccaaactcagccctccgttaagatcctggttccatgccgcagtaggacagcaggcccaagtctgcacatcccagtgatgcaccatgccaatagtggataagttgaaggaggccctgaaacccggccgcaaggactcggctgatgatggagaactggggaagcttcttgcctcctctgccaagaaggtccttttacagaaaatcgagttcgagccagccagcaagagcttctcctaccagctggaggccttaaagagcaaatatgtgttgctcaaccccaaaacagagggagctagtcgccacaagagtggagatgacccaccggccaggagacagggcagtgagcacacgtatgagagctgtggtgacggagtcccagccccgcagaaagtgcttttccccacggagcgactgtctctgaggtgggagcgggtcttccgcgtgggcgcaggactccacaaccttggcaacacctgctttctcaatgccaccatccagtgcttgacctacacaccacctctagccaactacctgctctccaaggagcatgctcgcagctgccaccagggaagcttctgcatgctgtgtgtcatgcagaaccacattgtccaggccttcgccaacagcggcaacgccatcaagcccgtctccttcatccgagacctgaaaaagatcgcccgacacttccgctttgggaaccaggaggacgcgcatgagttcctgcggtacaccatcgacgccatgcagaaagcctgcctgaatggctgtgccaagttggatcgtcaaacgcaggctactaccttggtccatcaaatttttggagggtatctcagatcacgcgtgaagtgctccgtgtgcaagagcgtctcggacacctacgacccctacttggacgtcgcgctggagatccggcaagctgcgaatattgtgcgtgctctggaactttttgtgaaagcagatgtcctgagtggagagaatgcctacatgtgtgctaaatgcaagaagaaggttccagccagcaagcgcttcaccatccacagaacatccaacgtcttaaccctttccctcaagcgctttgccaacttcagcggggggaagatcaccaaggatgtaggctatccggaattcctcaacatacgtccgtatatgtcccagaataatggtgatcctgtcatgtatggactctatgctgtcctggtgcactcgggctacagctgccatgccgggcactattactgctacgtgaaggcaagcaatggacagtggtaccagatgaatgattccttggtccattccagcaacgtcaaggtggttctgaaccagcaggcctacgtgctgttctatctgcgaattccaggctctaagaaaagtcccgagggcctcatctccaggacaggctcctcctcccttcccggccgcccgagtgtgattccagatcactccaagaagaacatcggcaatgggattatttcctccccactgactggaaagcgacaagactctgggacgatgaagaagccgcacaccactgaagagattggtgtgcccatatccaggaatggctccaccctgggcctgaagtcccagaacggctgcattcctccaaagctgccctcggggtccccttcccccaaactctcccagacacccacacacatgccaaccatcctagacgaccctggaaagaaggtgaagaagccagctcctccacagcacttttcccccagaactgctcaggggctgcctgggaccagcaactcgaatagcagcagatctgggagccaaaggcagggctcctgggacagcagggatgttgtcctctctacctcacctaagctcctggctacagccactgccaacgggcatgggctgaaggggaacgacgagagcgctggcctcgacaggaggggctccagcagctccagcccagagcactcggccagcagcgactccaccaaggccccccagacccccaggagtggagcggcccatctctgcgattctcaggaaacgaactgttccaccgctggccactccaaaacgccgccaagtggagcagattctaagacggtgaagctgaagtcccctgtcctgagcaacaccaccactgagcctgcaagcaccatgtctcctccaccagccaaaaaactggccctttctgccaagaaggccagcaccctgtggagggcgaccggcaatgacctccgtccacctcccccctcaccatcctccgacctcacccaccccatgaaaacctctcaccccgtcgttgcctccacttggcccgtccatagagccagggctgtgtcacctgctccccaatcatccagccgcctgcaaccccccttcagcccccaccccacattgctgtccagtacccccaagcccccagggacgtcagaaccacggagctgctcctccatctcgacggcgctgcctcaggtcaacgaggaccttgtgtctcttccacaccagttgccagaggccagtgagcccccccagagcccctctgagaagaggaaaaagacctttgtgggagagccgcagaggctgggctcagagacgcgcctcccacagcacatcagggaggccactgcggctccccacgggaagaggaagaggaagaagaagaagcgcccggaggacacagctgccagcgccctgcaggaggggcagacacagagacagcctgggagccccatgtacaggagggagggccaggcacagctgcccgctgtcagacggcaggaagatggcacacagccacaggtgaatggccagcaggtgggatgtgttacggacggccaccacgcgagcagcaggaagcggaggaggaaaggagcagaaggtcttggtgaagaaggcggcctgcaccaggacccacttcggcacagctgctctcccatgggtgatggtgatccagaggccatggaagagtctccaaggaaaaagaaaaagaaaaaaagaaagcaggagacacagcgggcagtagaagaggatgggcatctcaaatgcccaaggagtgccaagccccaagatgctgttgtccccgagtccagcagctgcgcaccatccgcgaatggctggtgtcctggggaccgcatggggctgagccaggcccctcctgtgtcttggaatggagagcgggagtctgatgtggtccaggaactgctcaaatactcatctgataaagcttacgggagaaaagttctgacctgggatggcaagatgtcggcggtcagtcaggatgctattgaagacagcagacaggcccggactgagaccgtggttgatgactgggacgaagagtttgaccgagggaaggaaaagaaaattaaaaaatttaagagagagaagaggagaaacttcaacgccttccagaaacttcagactcgacggaacttctggtctgtgactcacccagcaaaggctgccagcctcagctatcgccgctgactgtgcccctgtggaaggaggtcggttccgagggggtgggtgtaagggtgaggtgggggtgtgtgtgccgtgtatgtgtgtaggggtgtggtggggtgtggcgtgtgtgtatgatgtatgtgggctgtgtatctggcacatgtgtgttgggtggtgtgtgtggtgtgggcgcgtctgtggtgtgtgtcctagtcacttggagaagggtgtgtgtgggatgcgtgtgtataagggggtgtgtgtgggatgcgtgtgtataagggggtgtgtgtagtgtgtgttgggtgtggggtgtgtacacctggcatctgtggcatgtgttctggtcacttggagaagggcatgtgtggggtgtgtgtgggatgtgggttgtgtgtatatctggcatgtgtcccagtcacttgcagaagggtgacttcttgccagccgcatcgagatgccatgcattgggttcctaggttggactcatacccgagggtggcagtgggaagattcgggtctcgtttctctctgtcaggactaccgtggtttgttctgcagcctcctggagacaaggcgtcccttcccgggagctgtcggtctggatctgagggagctctctgtgtgggctctgctgcgctgggagcctgtcacggtaggagctctcccggtaccagtgtccacagaccgcccaacacagaggctttgaggcttctctagatcggaacctctttggtgacattcccgaccagccctgcaagagaaacgacagtgtgtgtgtgagcagaggtggccgcacacctgctggacatctttgccaggctgtgccttctcatgtttcatagacagtggtctgtgctggcagaggctgctgcccctggttggggctatcaggagagtgggggatggtggccacatgtcccccaggtggtctcccggtgcatagctggtggctctgggcaagccatcccttgcttctcggggctgacgccaccgttgtgtccgagcccgccctcccctgcttcctcagcgggaccccttcatctgttggccttacctgtcctcagaaaggaagaggtgaccccacccagccacctctcccttttatggaactcgagagggtggccctactgtgcaccccttccttgtgagtagctctcaactgtcctggagagcagaggctatttggggtcggaggagccctcgatacctgcgaatacatctgctttccaggctgctgtttattctgagacgactgtgctgtagcttcccttgcagctgcaataacccgcaggtcttcactgaggtggaggctttggggtagaattctccatttattttactacttaatacaaaacatttatttttgaccagtcctgtggcttccattagcaatatgtttcctttcccaaatatgcaaatagtggctttgtttgctcaattttgtgagtgctttggaatttaaatgattgtataactcaagaagattacttttctatgttgctcaagctgtgcctgccaacttgtaacttaataaatacaggaaatcctcagagaa

SEQ ID NO: 2403 - DNA, 8015 bp, Homo sapiens
catcagccgctctccctgactaggggtagctagcggcctccctcctttgggttctgtatccctacttccattaccctcggctcctcccactcctcgggggctccgtgctttccgcgggtctgtccgggggctccggaccctcggcgcagctgagttgatggcttccggagaactggcatagccgcagaatatgagtagtgtcccaagaagagtgctttgcctttggcacaaggatcagaataaaggtgaattgctattacatagggtttttcggtaaaagtcactgaaaattatttgccatacagtaaccagagacctccaactaggggcccccaaactgtatcctgcctgtagccagaagcaatttttaaagaaaatatgtctcctctgaagatacatggtcctatcagaattcgaagtatgcagactgggattacaaagtggaaagaaggatcctttgaaattgtagaaaaagagaataaagtcagcctagtagttcactacaatactggaggaattccaaggatatttcagctaagtcataacattaaaaatgtggtgcttcgacccagtggagcgaaacaaagccgcctaatgttaactctgcaagataacagcttcttgtctattgacaaagtaccaagtaaggatgcagaggaaatgaggttgtttctagatgcagtccatcaaaacagacttcctgcagccatgaaaccgtctcaggggtctggtagttttggagccattctgggcagcaggacctcacagaaggaaaccagcaggcagctttcttactcagacaatcaggcttctgcaaaaagaggaagtttggaaactaaagatgatattccatttcgaaaagttcttggtaatccgggtagaggatcgattaagactgtagcaggaagtggaatagctcggacgattccttctttgacatctacttcaacacctcttagatcagggttgctagaaaatcgtactgaaaagaggaaaagaatgatatcaactggctcagaattgaatgaagattaccctaaggaaaatgattcatcatcgaacaacaaggccatgacagatccctccagaaagtatttaaccagcagtagagaaaagcagctgagtttgaaacagtcagaagagaataggacatcagggcttttacctttacagtcatcatccttttatggtagcagagctggatccaaggaacactcttctggtggcactaacttagacaggactaatgtttcaagccagactccctctgccaaaagaagtttgggatttcttcctcagccagttcctctttctgttaaaaaactgaggtgtaaccaggattacactggctggaataaaccaagagtgcccctttcctctcaccaacagcagcaactgcagggcttctccaagttgggaaatacctgctatatgaatgctattctacaatctctattttcactccagtcatttgcaaatgacttgcttaaacaaggtatcccatggaagaaaattccactcaatgcacttatcagacgctttgcacacttgcttgttaaaaaagatatctgtaattcagagaccaaaaaggatttactcaagaaggttaaaaatgccatttcagctacagcagagagattctctggttatatgcagaatgatgctcatgaatttttaagtcagtgtttggaccagctgaaagaagatatggaaaaattaaataaaacttggaagactgaacctgtttctggagaagaaaattcaccagatatttcagctaccagagcatacacttgccctgttattactaatttggagtttgaggttcagcactccatcatttgtaaagcatgtggggagattatccccaaaagagaacagtttaatgacctctctattgaccttcctcgtaggaaaaaaccactccctcctcgttcaattcaagattctcttgatcttttctttagggccgaagaactggagtattcttgtgagaagtgtggtgggaagtgtgctcttgtcaggcacaaatttaacaggcttcctagggtcctcattctccatttgaaacgatatagcttcaatgtggctctctcgcttaacaataagattgggcagcaagtcatcattccaagatacctgaccctgtcatctcattgcactgaaaatacaaaaccaccttttacccttggttggagtgcacatatggcaatttctagaccattgaaagcctctcaaatggtgaattcctgcatcaccagcccttctacaccttcaaagaaattcaccttcaaatccaagagctccttggctttatgccttgattcagacagtgaggatgagctaaaacgttctgtggccctcagccagagactttgtgaaatgttaggcaacgaacagcagcaggaagacctggaaaaagattcaaaattatgcccaatagagcctgacaagtctgaattggaaaactcaggatttgacagaatgagcgaagaagagcttctagcagctgtcttggagataagtaagagagatgcttcaccatctctgagtcatgaagatgatgatgagccaactagcagcccagataccggatttgcagaagatgatattcaagaaatgccagaaaatccagacactatggaaactgagaagcccaaaacaatcacagagctggatcctgccagttttactgagataactaaagactgtgatgagaataaagaaaacaaaactccagaaggatctcagggagaagttgattggctccagcagtatgatatggagcgtgaaagggaagagcaagagcttcagcaggcactggctcagagccttcaagagcaagaggcttgggaacagaaagaagatgatgacctcaaaagagctaccgagttaagtcttcaagagtttaacaactcctttgtggatgcattgggttctgatgaggactctggaaatgaggatgtttttgatatggagtacacagaagctgaagctgaggaactgaaaagaaatgctgagacaggaaatctgcctcattcgtaccggctcatcagtgttgtcagtcacattggtagcacttcttcttcagatcattacattagtgatgtatatgacattaagaagcaagcgtggtttacttacaatgacctggaggtatcaaaaatccaagaggctgccgtgcagagtgatcgagatcggagtggctacatcttcttttatatgcacaaggagatctttgatgagctgctggaaacagaaaagaactctcagtcacttagcacggaagtggggaagactacccgtcaggcctcgtgaggaacaaactcctgggttggcagcatgcactgcatatttgttactgctgcccacctcacctttcctctgctgaaggagaatttggaattctacttgatgcgggagcaacaaacagctcagggccaaaccaaaagacaaaaattggagtaacgtagaatgctccatgctattttatggaaactttggtctcacatccgtagctgattatcctctttttctcctatgagtggcacttcttttgtcttaggaatacatgttgtaaatatatatctgtgtatgtgtgtatacacacacacagacacacacacacacacacgggatgaatggagccttaaagagttaggatgagccaccagaatatgcctgctcaaaattaatagcacagcagtttggagaagaaatgaaggtgtcaaagagtccattcacctgagaaatgtgtgaagacatacttatcagttggcttttagcttttatgttccttgagtagtttcactcaagtctgtaaccttttgtgttccttattagtaaaattcactggaaagccagctcttcatgttacactaatgacagtttgttctctttgcaagagaggggcattactgtcacctgacttgaggagctgttttgttgttgttgttgtctgcaaatttcatgaatttgtgatgtctttgctgtttacatgcagtcccaagaaatggattgttggtgctttggaatatgttacagtcccacatttgatatttcttatatactttgttttctctaaggagatttcttcacacagtatgttcatcatatatcatcatcattattatggtggtaaagatagaatcttttttcttttttgtcattctgccatggagcagcattaccctaatggattgcaaccaaaactttaaacaagtagaaagataatatttctccaattgggactccccagcaggaatacttagggataaggaagaatgctagcatctctgtctctcaaacatagggaggataagaagagtgttcttctggtaaagctaaaattctggaccactgaagctaaaagccctattgcaagtatgaaattaagtacttgagctataggacaaaccttgggcatttaaccatttactgtctggctttgcccttaaaatagggttgcaattaaaatgtgattggcttaggtaatcccaaaaactaacaaataacaaaggtgcataatttatttatctactttttaggtgctctgagttgaggcaaagtagagcggcaacattaagtgctatgctagtcacttagctgacgtaaccagcttggttaagcagcttatgaaaccatataaagaattcttttgaggatggaattctgtccacaaaataattttgtgagcccagatatcattaggatcacacagagttaaatatagaaaaatgaaaccatcattatattctttcgtgttttttcttttattataaacaaggggattattctttagttctcagaggtagggacaaaaccacatcaggttttcagaaggaaaaaacatttaaaaacccaccatcacatgagagaatcacttgaacccaggaggcagaggttgcagtgagctgagatcgcatcattgcactgcagtctgagtgacagagtgagactccatctcattaaaaaaaacgaaaacaaaaacaaaaaaaacacaaaccatcatcacagaagatgcaacatcttttctgaaagattgccttaagagagctccagtcctactcttggaacttggatgtattctaatgtagtaaactattctaagttttcattctttgaattataaatggcctcagcagttttgctcaactactgataaatgctttgcctcctaccatctacctatataccttattgtaatgaatgttccaaaatggtagagtggtagaaaacgccagagtagtttagagcagaggaaaatatttgttttaaaactagctttaaagttttgtttcatttctaccaggagcctctttggtttggtttgattttgcttggaaataattggttttcttataaatgagtgaagcggtgataaaattctttggctagttattaattcttttacgtgtctttgcatttgagaggcactgttaaaaattattgggaaagatttaaagtgcaggctgcaattaaaacatggagaaaagtagaaataatgccataagtctagattgcctcatgaagcagcctcatttgaattgctttcatagctttcatgtgtgtatggtttagaagtacacttacctcagaaacctgatttgatcttcatgtcttgggcaggagttgttgaaaataggttattggaatatataagttatctcactgctcatgtacttgcatgtttgggactcaaattttacttgatgtctgtccattcttgtggccctatcagccttctccttcctttactcctttaatctacttctttgactaccagtggagatttcagctggactatgttgatggggtttgttgttgtttttgagctggctgtatatattttaaaattataaatagataatatattattttttgcacattgtgatcagtttgcccagaattggggatggggcagttagcatgttggggccaggaagggacaagttagataaggactgagtgcttccgttgcaggcagtttgcacaatacctaattaaccttcctattgaaaataccaaatgtgtggttacattactttaaatgacattgaattggaacttgatggcaattagttctagatacaaccttttgatctttgttggaattttaagggaaaaatgaactaaacttcatatttgttgattttaatcacctaatagtactgaaggttggaaagttgcatgtggctggatgctgttaatttctttaatagccatgactataatttaagcctatgagaagatagactgtttcgtagggatatatttacatgtgtgtgcacactcatgagttttgtctcagcaggatagaataagcaaatccatgaactggtcttctattaatactttgattctaaaaattatttgtttacttgctatggtctgttcattctgggcctaaccctaaaggctcaataacaaatacaacaaatgtaaatatgtttacattttaagacatatgcagtggttcttacagatcagttaattaactccagaaagcaaatgttagactacacatttatttttctccttgatcaagtgtaaaattctgaaacagaggctttaaaatttaaaacctcagcaaaataatccatgaatttactgattcttctgtatcgtgtgtagttaccattatgtaactatacacacatacagctatggatatagttgtataatgaaaattatctgcaaacacctaaattaaagagaaaaaaaagtagtttgtaaactcatttgtgatctactgaaaagaggttatattaaagcaaattaaaatattttccttctctgtcctctgaaatgactgcagtagatactcttagttatcccatttagggtggttggagggcctttttaatttaattgaccccccgaggtggtcttttgttttaaacagggggcaacagctggatctccaagtacatatggattttgtatatataggagatttttagaaaaatcaacaacctaacaccagattcaagtcacataaaagtgttccaataaaatggatggatgtctttttcctccccattttgctttatactgagtaatgcactcttgcaagtgtatacaaaaactaaatagacttctgccctccaacatctttttattgcattacttcaaaatcctaattttgtctctactgatatgtcttattaacatctgaaaaaatatatattttttattggaaaattctaatttgttaggccttgaaagttttgtgacaattattttgctgtgtttaaccacaatcattcaccttatggcatgctttgattactagacttcaggcagtctcattcattgtatcatacttacacacaattagtaagttgtctccatgtgtgctatatgtctgaggtgtatggagtttttatttaaaaagtgtgccagtctgaatataagcatttgattttgtaacattggacttttcttaaaagtacagaggttcaaagtataggtatgtccattggcataagaatagagtgggtgagggtctggaccaggttccaggttggtccagtcagatgccagaacaaagaagaacagtcaactaaactggtctacttcaaaaatagtgggcctgtgtgaagaatgagaccacatgtgggtgtgcacacctcttgtccccaggtttccctccctttgagcttttctttccctccctaacttctctggcctattgtcattgttgtttctttaaacttaaggagagaaaaacaaaaatgagattcctacactttgcctaattgagccactaccaggttttctggcagctgtggccacattatttgtgagatgattttttttctttatgttcagagtgacttttgattctgattctttatgttttgtatggagcggcacttttatctgtgttttagcagaactgttcctctgtatcctttacggtttttctttgtttttgtttcctttttaaattatgcatagagtttttttgtgtgtatgaaattaaagcctttattaaccttcaaaaaaaaaaa

SEQ ID NO: 2404 - DNA, 4684 bp, Homo sapiens
cttcggtctcttctccccggctgatcccagcactctccgtgacagcgcctcctgactcagcccaggaccggcttcttctcacgacctgctggagactggacgcccacacctgacccggaactcggaggcgtgcttcctccacccgccggctagcagccccgggccctgagctcccgccgacgccgctggggggcccgacaggcccctcggcgctgatgctgagtgggatcgagggcccggggcggcggcggagtacgggcctctggcgccttaggccagccgcaggtgtcggttcttaggctctccaggctcgctagctcccgccccggcttggatgggtctccctgcgccataaatgtggctgctgaggcggcggtggccgtggcccgtcgcgctgctgctgcggcgctccaagttcatctccgccccggggctctcctgccccacctcggggctgccgccacccgctccttatcccctggccctggccttgcagcgtggcgacaatggacaagatcctggagggccttgtgagttcctcgcatcccctgcccctcaagcgggtgattgtgcggaaggtggtggaatcggcggagcactggctagacgaggcgcagtgcgaggccatgtttgacctgacgacccggctcatcctggagggccaggaccctttccagcggcaggtggggcaccaggtgctggaggcctacgcacgataccaccggccagagttcgagtccttcttcaacaagaccttcgtgttgggcctccttcatcagggctaccactctctggacaggaaggatgtagccatcctggactacattcacaacggcctgaagctgattatgagctgtccgtcggtgctggatctctttagcctcctgcaggtagaggtgttacggatggtgtgtgagaggccggagccgcagctctgtgcccgactgagcgaccttctgaccgactttgtgcaatgcatccccaaggggaaattgtccatcacgttctgtcaacagctggttcgaacgataggccatttccagtgcgtgtccacccaggaaagagagctgcgggaatatgtctcccaggtgacaaaagtgagtaacttgctgcagaacatctggaaggccgagcctgccacactactgccttccctgcaagaagtttttgcaagcatctcttccacagatgcatcatttgaaccttctgtagcattggcaagccttgtgcagcatattcctcttcagatgattacagttctcatcaggagccttactacggatccaaatgtaaaagatgcaagtatgacccaagccctttgcagaatgattgactggctatcctggccattggctcagcatgtggatacatgggtaattgcactcctgaaaggactggcagctgtccagaagtttactattttgatagatgttactttgctgaaaatagaactggtttttaatcgactttggtttcctcttgtgagacctggtgctcttgcagttctttctcacatgctgcttagctttcagcattctccagaggcgttccatttgattgttcctcatgtggttaatttggttcattctttcaaaaatgatggtctgccttcaagtacagccttcttagtacaattaacagaattgatacactgtatgatgtatcattattctggatttccagatctctatgaacctattctggaggcaataaaggattttcctaagcccagtgaagagaagattaagttaattctcaatcaaagtgcctggacttctcaatccaattctttggcgtcttgcttgtctagactttctggaaaatctgaaactgggaaaactggtcttattaacctaggaaatacatgttatatgaacagtgttatacaagccttgtttatggccacagatttcaggagacaagtattatctttaaatctaaatgggtgcaattcattaatgaaaaaattacagcatctttttgcctttctggcccatacacagagggaagcatacgcacctcggatattctttgaggcttccagacctccatggtttactcccagatcacagcaagactgttctgaatacctcagatttctccttgacaggctccatgaagaagaaaagatcttgaaagttcaggcctcacacaagccttctgaaattctggaatgcagtgaaacttctttacaggaagtagctagtaaagcagcagtactaacagagacccctcgtacaagtgacggtgagaagactttaatagaaaaaatgtttggaggaaaactacgaactcacatacgttgtttgaactgcaggagtacctcacaaaaagtggaagcctttacagatctttcgcttgccttttgtccttcctcttctttggaaaacatgtctgtccaagatccagcatcatcacccagtatacaagatggtggtctaatgcaagcctctgtacccggtccttcagaagaaccagtagtttataatccaacaacagctgccttcatctgtgactcacttgtgaatgaaaaaaccataggcagtcctcctaatgagttttactgttctgaaaacacttctgtccctaacgaatctaacaagattcttgttaataaagatgtacctcagaaaccaggaggtgaaaccacaccttcagtaactgacttactaaattattttttggctccagagattcttactggtgataaccaatattattgtgaaaactgtgcctctctgcaaaatgctgagaaaactatgcaaatcacggaggaacctgaataccttattcttactctcctgagattttcatatgatcagaagtatcatgtgagaaggaaaattttagacaatgtatcactgccactggttttggagttgccagttaaaagaattacttctttctcttcattgtcagaaagttggtctgtagatgttgacttcactgatcttagtgagaaccttgctaaaaaattaaagccttcagggactgatgaagcttcctgcacaaaattggtgccctatctattaagttccgttgtggttcactctggtatatcctctgaaagtgggcattactattcttatgccagaaatatcacaagtacagactcttcatatcagatgtaccaccagtctgaggctctggcattagcatcctcccagagtcatttactagggagagatagtcccagtgcagtttttgaacaggatttggaaaataaggaaatgtcaaaagaatggtttttatttaatgacagtagagtgacatttacttcatttcagtcagtccagaaaattacgagcaggtttccaaaggacacagcttatgtgcttttgtataaaaaacagcatagtactaatggtttaagtggtaataacccaaccagtggactctggataaatggagacccacctctacagaaagaacttatggatgctataacaaaagacaataaactatatttacaggaacaagagttgaatgctcgagcccgggccctccaagctgcatctgcttcatgttcatttcggcccaatggatttgatgacaacgacccaccaggaagctgtggaccaactggtggagggggtggaggaggatttaatacagttggcagactcgtattttgatcctgagagagtccaaaatgcactggtcacgaaacgtctaatactatgactgttaaaatgtcagactataacaaatatctatcttttatttttcattagacccttatacttcaagagaacacactcagtgcttgtttttattttcttgacacatttattaacaaaatgcatcatggaaaaaaaatctacctcttaaaattccatttgcttttatggttagacatgcttgaccaaaaatgttcagaagaaaatatgtacctggtccctaattaagctgcgttaaatttggtagaagcatttaaatggtctatcttcagttttactgaacaaaaaatgtaatttatttagcattctttataaaagaattgatgctagaggtaaaaaaaaatacttgtttttaaaaaatcctttacgtcttgtgtaattaccccattattaaattcaagtccttgaaaatcaactagagattataaagtctctaaagaaggcaataacaaaatttatcaagatatagtacttttcagtttttgtttagtgtcttcagcatcactgtgtctgtatttcaagtacaaatgtttttaaaaaggattctttatacatatgtgctgaattgattttaagaaagttgcatgatcctgtaggagcaacatttttacctaaaaaatgctaactttatagtatttctaattgttcaaggattttaaaattctatttcagggagtatatcttctgtggttttgaaggaggtgagttctgtatgtgccttgcagtactgtaattcaaaaataggaatctttggctgcaaaattttaatgaaatgttaggaagtaattttcgtgctaacattaaaattataactttttgaaaggtaatagattttccagaagtaaaatctgatggttctaaatcaatcaatgtgatagttcatttttaactcttagaagaattcagaggaaattaacccagctaagtaaaaaatctgtcttgattttgttacttattcctcagaatattaaacattgatcacataaaaaaaaaaaaaaaaaaaa

SEQ ID NO: 2405 - DNA, 4413 bp, Homo sapiens
agatccttccttctctcctccttcttcattctacaccacccccaacacatatccctgcaccccgcccattctttgctctctctcctttcttacacttaactccttcttgctccacagcctaacatgctgattaacaggaccccaaaggtttgggtgggtattaggggccttctcaacaaaagcagcacactcttgagcttgttcttccttttgttgccatctcagataaaaaggccccatgagggaggagacagataagtatagacttggtattctgataactctgtgttacatgggatcagatgtaaatgagttgtaccctgtggtgtttcatgctctgctgtgttgtcttctcatggtgagcttttctgtgcccttatttcatccagctctggtttctgtgtttcatgttatttctcctagcctctgtaaactctgcagcatactaataatgctctggctttctgattaaagataaatggcttactatcatcacccctggcttgagggccagctcacatgtaatcccttataggattccaaagttgttaaataaatgcagttctttttgtcattttgaagcattcaaaaatttttcaagaaaagctatgatcatataaatagaaattttatccagaatgttacagtgtagcatttgtgaataaatgtgtaggtgctgtatttgctcagactctagtttgggttgtgttttcttttccctttttttttttgagacggggtctctctctgtcatctgggctgcagtgcagtggtgtaatcacagctcactgcaacctctactcccaggctcaagcaatcctcctgagtagctgggactggagacatgcgccacaacgcccagctaatttttaggtttttctttcacatagacggggtctcactctgttggccaggctggtttcgaactcctggactcaagcagttccccccacctcagcctcctaaagtgctgggattacaggcctgagccaccatacccagcaagttatattttctttttccttatatagagtaaaataagggtgagtgaccgagaggttgatgcatagctagatcaccagtttaaatgccttcccacacacccctttcctcctgttccctccacctacaggttgtagatgagcatgagagtgtggagcagagttggcgagtgcaagtcgagcccatcaacctggacagctgtctccgtgctttcaccagtgaggaagagctaggggaagatgagatatactactgttccaagtgtaagacccactgctttagcaacaaagaagctggatctctggaggcttccacccttcctgattattcaccttaagcgatttcaatttgtaaatgatcagtggataaaatcacagaaaattgtcaaatttcctcgggaaagttttgatccgagtgcttttttggtaccacgagacccggctctctgccagcatcaaccactcacaccccagggggatgagctctccaagcccaggattctggcaagagaggtgaagaaagtggatgtgcagagtttggctggggaagaggacatgctcctgagcaaaagcccatcctcactcagcgctaacatcagcagcagcccaaaaggttctccttcttcatcaagaaaaagtggaaccagctgtccctccagcaaaaacagcagccctaatagctgcccacggactttggggaggagcaaagggaggctccggctgccccagattggcagcaaaaataaactgtcaagtagtaagaagaacttggatgccagcaaagagaatggggctgagcagatctgtgagctggctgatgccttgagtcgagggcatatgcgggggggcagccaaccagagctggtcactcctcaggaccacgaggtagctttgggcaatggattcctttatgagcatgaagcatatggcaatggctacagcaatggtcagcttggaaaccacagtgaagaagacagcactgatgaccaaagagaagacactcatattaagcctatttataatctatatgcaatttcatgccattcaggaattctgagtgggggccattacgtcacttatgccaaaaacccaaactgcaagtggtactgctacaatggcagcatctgtgaggaacatcaccctgatgaaattgacaccgactctgcctacattcttttctatgagcagcagaggatagactacgcacaatttctgccaaagattgatggcaaaaagatggcagacacaagcagtatggatgaagactttgagtctgattacgaaaagtactgtgtgttacagtaaagctaccactctggctgctagatagcttggtggggagggagatgactccttgtagctgatacttggcaaaagtgtcactgagaggcaagctaaatgtagttattttatcctgttagaatacaaattctaattaaaatagttaactttaagagtagtagtaattttattttgaagtctcatgcaagttgtctgatagagaactttcaggcagatcccaccattagcctgtaaacaaaaagtttggcaccagccacctgggaccaaataagaattcaattgtgcttgtccagatatgaacaaatatgtagtgagtatagagtttatcaataatcataacaaatattaaagatttccttggagtcaaagtaaaaaacaaaaaattgtaatgttgtctagggatgacatgatatgctacctcctttttcctgaagttttattccattctgttgacaagatggagaaagcaagatcatgaaggtgtgcaaatgattcttacggcatgggcgaggatttttcaatttattttttaaagtttccataccctttctttgtctttcttgctttttgtttttgccgttgtgtttatgtttgagatacaaccagtcattggtggcaggggcatagagtggtcagtctgaaagggaggctctcttaagagctatgtgccttccacccagagggagacccagtagaaagaaaaacatcctgggaaatccagctaccatggccctcccagtggaggcatcttacatttaggatacttcaggtatcctcagaaatgtattctgcaccccccggccccgcccatgctgagggaaggggagcagttgccaatatttgcaccatcttcacatgcacatgttgcaacaagagcttctgggaaggtaagcggcatcggagctagatcacgtttcacaattagtggtggttcttttccatgtttgttttgcactttaaaaaagagagaacacatgcaaatgaacttgcttgtgtgtatttgatggctccaagggctataaattacaaacaaaacacatcccagacattaggagttcataagtatatttaatgaaattggtggttttaggaagtcaactttagttttgctttgtttgcatgtccactaatttttttattttgatattagtcttttttaaaaaattttacagtagtcattgaaagttatgtttctttgtttacttcattttttcctctaaatattcaagactgggacaaaagtataaatattatttatttcaggtagaatttttttggtgtagttttttaatatatacttgaaggaaatgtttcaccttatttttggtctttgtttattcatttagaccctgcaagttgattctcattaattgtcagattccactacactttcttcctcataggtagtaattaccagtgtaactaagcatttgtgttctgatatctgaggccagtaactattaatatctagttctcagagcatttggaaaggttatcttaaatggctacctaaattgaaatccttttcagaaaaaatataattgcaaataggtaggagtggcctaaattatctaatgtaataaagtcagacaaaatgcatactttatagttcaagattttcggtatataaaatctgtcctttcctacctggacatgtcccattaaaaagtggaagattttaaataatttctttacagatgttttatttaagcaggtagcacaatctactaatgttgtttgatctgtgtttgttatactggttgtaattaatttttttaattcatgaactagcggaaaatttattaaattaactattaaccacattcaccttgtaaatgactgtataaaacttgttgacaatgcactgactttagaaagatgttaatgtgcataaatagagtgtaaataaaatagtgttgatgtactgaaatatgaactgtataaaaagtattagtaattgtatatggggtgtacctgtttatctgtaactgttatccaaacaaattaaatactgtggatgcctttaaaaaaaaaaaaaaaaaaaaaaaaaaaaaaaaaaaaaaaaaaaaaaaaaaaaaaaaaaaaaaaaaaaaaaaaaaaaaaaaaaaaa

SEQ ID NO: 2406 - DNA, 7026 bp, Homo sapiens
aagagggcgtgaggagggaaggagagggaggagagagaggagagagaagggcggagtaggaggcaggggaagggggcggggcggaagagtcacgtgatccggcatggaggcggtggcggcgaccgggaggagccgccggggcagaagccgcacttgttagtgtggggggaggtgggggcgggggacgccgacaccgtcaccgtcacccagggacgccgaggagaaggcgggaggggggtgggggcgagatcaggctccgaccccccgccgaggggatgaggggagcatgggtgccaaggagtcacggatcggattcctcagctacgaggaggcgctgaggagagttacagatgtagagctaaaacgactgaaggatgctttcaagaggacctgtggactctcatattacatgggccagcactgcttcatccgggaagtgcttggggatggagtgcctccaaaggttgctgaggtgatttactgttcttttggtggaacatccaaagggctgcacttcaataatttaatagttggacttgtcctccttacaagaggcaaagatgaagagaaagcaaaatacatttttagtcttttttcaagtgaatctgggaactatgttatacgggaagaaatggaaagaatgctccacgtggtggatggtaaagtcccagatacactcaggaagtgtttctcagagggtgaaaaggtaaactatgaaaagtttagaaattggctttttctaaacaaagatgcttttactttctctcgatggcttctatctggaggtgtgtatgttaccctcactgatgatagtgatactcctactttctaccaaactctggctggagtcacacatttggaggaatcagacatcattgatcttgagaaacgctattggttattgaaggctcaatcccggactggacgatttgatttagagacatttggcccattggtttcaccacctattcgtccatctctaagtgaaggtttgtttaatgcttttgatgaaaatcgtgacaatcacatagattttaaggagatatcctgtgggttatcagcctgttgcaggggacccctggctgaaagacaaaaattttgcttcaaggtatttgatgttgaccgtgatggagttctctccagggttgaactgagagacatggtggttgcacttttagaagtctggaaggacaaccgcactgatgatattcctgaattacatatggatctctctgatattgtagaaggcatactgaatgcacatgacaccacaaagatgggtcatcttactctggaagactatcagatctggagtgtgaaaaatgttcttgccaatgagtttttgaacctccttttccaggtgtgtcacatagttctggggttaagaccagctactccggaagaagaaggacaaattattagaggatggttagaacgagagagcaggtatggtctgcaagcaggacacaactggtttatcatctccatgcagtggtggcaacagtggaaagaatatgtcaaatacgatgccaaccctgtggtaattgagccatcatctgttttgaatggaggaaaatactcatttggaactgcagcccatcctatggagcaggtcgaagatagaattggaagcagcctcagttacgtgaatactacagaagagaaattttcagacaacatttctactgcatctgaagcctcagaaactgctggcagcggctttctgtattctgccacaccaggggcagatgtttgctttgctcgacaacataacacttctgacaataacaaccagtgtttgctgggagccaatgggaatattttgttgcaccttaaccctcagaaaccaggggctattgataatcagccattagtaactcaagaaccagtaaaggctacatcattaacactagaaggaggacgattaaaacgaactccacagctgattcatggaagagactatgaaatggtcccagaacctgtgtggagagcactttatcactggtatggagcaaacctggccttacctagaccagttatcaagaacagcaagacagacatcccagagctggaattatttccccgctatcttctcttcctgagacagcagcctgccactcggacacagcagtctaacatctgggtgaatatgggaaatgtaccttctccgaatgcacctttaaagcgggtattagcctatacaggctgttttagtcgaatgcagaccatcaaggaaattcacgaatatctatctcaaaggctgcgcattaaagaggaagatatgcgcctgtggctatacaacagtgagaactaccttactcttctggatgatgaggatcataaattggaatatttgaaaatccaggatgaacaacacctggtaattgaagttcgcaacaaagatatgagttggcctgaggagatgtcttttatagcaaatagtagtaaaatagatagacacaaggttcccacagaaaagggagccacaggtctaagcaatctgggaaacacatgcttcatgaactcaagcatccagtgtgttagtaacacacagccactgacacagtattttatctcagggagacatctttatgaactcaacaggacaaatcccattggtatgaaggggcatatggctaaatgctatggtgatttagtgcaggaactttggagtggaactcagaagaatgttgccccattaaagcttcggtggaccatagcaaaatatgctcccaggtttaatgggtttcagcaacaggactcccaagaacttctggcttttctcttggatggtcttcatgaagatcttaatcgagtccatgaaaagccatatgtggaactgaaggacagtgatgggcgaccagactgggaagtagctgcagaggcctgggacaaccatctaagaagaaatagatcaattgttgtggatttgttccatgggcagctaagatctcaagtaaaatgcaagacatgtgggcatataagtgtccgatttgaccctttcaattttttgtctttgccactaccaatggacagttatatgcacttagaaataacagtgattaagttagatggtactacccctgtacggtatggactaagactgaatatggatgaaaagtacacaggtttaaaaaaacagctgagtgatctctgtggacttaattcagaacaaatccttctagcagaagtacatggttccaacataaagaactttcctcaggacaaccaaaaagtacgactctcagtgagtggatttttgtgtgcatttgaaattcctgtccctgtgtctccaatttcagcttctagtccaacacagacagatttctcctcttcgccatctacaaatgaaatgttcaccctaactaccaatggggacctaccccgaccaatattcatccccaatggaatgccaaacactgttgtgccatgtggaactgagaagaacttcacaaatggaatggttaatggtcacatgccatctcttcctgacagcccctttacaggttacatcattgcagtccaccgaaaaatgatgaggacagaactgtatttcctgtcatctcagaagaatcgccccagcctctttggaatgccattgattgttccatgtactgtgcatacccggaagaaagacctatatgatgcggtttggattcaagtatcccggttagcgagcccactcccacctcaggaagctagtaatcatgcccaggattgtgacgacagtatgggctatcaatatccattcactctacgagttgtgcagaaagatgggaactcctgtgcttggtgcccatggtatagattttgcagaggctgtaaaattgattgtggggaagacagagctttcattggaaatgcctatatcgctgtggattgggatcccacagcccttcaccttcgctatcaaacatcccaggaaagggttgtagatgagcatgagagtgtggagcagagtcggcgagcgcaagccgagcccatcaacctggacagctgtctccgtgctttcaccagtgaggaagagctaggggaaaatgagatgtactactgttccaagtgtaagacccactgcttagcaacaaagaagctggatctctggaggcttccacccatcctgattattcaccttaagcgatttcaatttgtaaatggtcggtggataaaatcacagaaaattgtcaaatttcctcgggaaagttttgatccaagtgcttttttggtaccaagagacccggctctctgccagcataaaccactcacaccccagggggatgagctctctgagcccaggattctggcaagggaggtgaagaaagtggatgcgcagagttcggctggggaagaggacgtgctcctgagcaaaagcccatcctcactcagcgctaacatcatcagcagcccgaaaggttctccttcttcatcaagaaaaagtggaaccagctgtccctccagcaaaaacagcagccctaatagcagcccacggactttggggaggagcaaagggaggctccggctgccccagattggcagcaaaaataaactgtcaagtagtaaagagaacttggatgccagcaaagaaaatggggctgggcagatatgtgagctggctgacgccttgagtcgagggcatgtgctggggggcagccaaccagagttggtcactcctcaggaccatgaggtagctttggccaatggattcctttatgagcatgaagcatgtggcaatggctacagcaatggtcagcttggaaaccacagtgaagaagacagcactgatgaccaaagagaagatactcgtattaagcctatttataatctatatgcaatttcgtgccattcaggaattctgggtgggggccattacgtcacttatgccaaaaacccaaactgcaagtggtactgttacaatgacagcagctgtaaggaacttcacccggatgaaattgacaccgactctgcctacattcttttctatgagcagcaggggatagactatgcacaatttctgccaaagactgatggcaaaaagatggcagacacaagcagtatggatgaagactttgagtctgattacaaaaagtactgtgtgttacagtaaagctaccactctggctgctagacagcttggcggtgagggagatgactccttgtagctgacatttggcaaaagcgtcactgaaaggcaagctaaatgtagttattttatcctgtggccctgaagcacaaaataaaaattctaattaaaatagttaactttaagagtagtaatcattttattttgaagtctcatacaagctctccgatagagaactttcaggcagatcccaccattagcctgtaaacaaaaggtttggcaccagccacctgggaccaaataagaattcaattgtgcttgtccagatatgaacaaatatgtagtgagtatagagtttaccataatcataacaaatattaaagatttccttggagtcagagtaaaaaacaaacaattataatgttgtctagggacgacatgatatgctacctcctttttcctgaagttttattccattatattgacaagatggagaaagcaagatcacgaaggtgtgcaaatgattcttaaggcatggacgaggatttttcaatttattttttaaactgtttccataccctttctttgtctttcttgctttttgtttttgccgttgtatttatgtttgagacacaaccagtcattggtggcaggggcatatagtggtcagtctgaaagggaggctctcttaagagctgtgtgccttccacccagagccttgtgggagacccagtagaaagaaacagcatcctgggaaatccagctaccatggccctcccagtggaggcatcttacatttaggatacttcaagtatcctcagaaatgtattctgcacccccggccccacccatgctgagggaaggggagcagttgccaatatttgcaccatcttcacatgcacctgttgcaacaagagcttctgggaaggtaagtggcattggagctagatcacgtttcacaattagtggttgttcttttctgtgtttgtcttgcactttaaaaaagagagaacacatgcaaatgaacttgcttgtgtgtatttgatggctctaagggctataaattacaaacaaaacacatcccagacattaggagttcataagtgtatttaatgaaattggtggttttaggaagtcaactttagttttgctttgtttgcatgtccactaatttttttattttgatatttgtcttttttttaaattttacagtagtcatcgaaagttatgtttctttgcttacttcatttttttctctaatcaagactggaacaaaagtataaatattatttatttcaggtagcatttttttcgtgtagttttttaatatatacttgaaggaaatgtttcaccttatttttggtctttgtttattcatttagaccctgcaagttgattctcattaattgtcagattccactaccctttcttcctcatagatagtaattaccaatgtaactaagtatttgtgttctgatatctgaggccagtaactattaatatctagttctcagagcatttggaaaggttatcttaaatggctacctaaattgaaatccttttcagaaaaaatataattgcaagtaggtaggactggcctaaattgtctaatgtaataaagtcagacaaaatgcatactttatagtttcaagattttcagtatataaaatctgtccattcccattaaaaagtggaagattttaaataatttctttacagatgttttatttaagcaggtagctcaatctactaatgttgtttgatctgtgtttgttatactggttgtaattaatttttttaattcatgaactagcagaaaatttattaaattaactattaactacattcaccttgtaaattactgtataaaacttgttgacaatgcactgactttagaaagatgttaatgtacataaatagagtgtaaataaaatagtgttgatgtaccg

SEQ ID NO: 2407 - DNA, 2509 bp, Homo sapiens
gtccatgtgagagaagctggctgctgaaatgactgcgaaccggcttgcagagagccttctggctttgagccaacaggaagaactagcggatttgccaaaagactacctcttgagtgagagtgaagatgagggggacaatgatggagagagaaagcatcaaaagcttctggaagcaatcagttcccttgatggaaagaataggcggaaattggctgagaggtctgaggctagtctgaaggtgtcagagttcaatgtcagttctgaaggatcaggagaaaagctggtccttgcagatctgcttgagcctgttaaaacttcatcttctttggccactgtgaaaaagcaactgagtagagtcaaatcaaagaagacagtggagttacctctgaacaaagaagagattgaacggatccacagagaagtagcattcaataaaaccgcacaagtcctctccaaatgggaccctgtcgtcctgaagaaccggcaggcagagcagctggtttttcccctggagaaagaggagccagccattgctcccattgaacatgtgctcagtggctggaaggcaagaactcccctggagcaggaaattttcaacctcctccataagaacaagcagccagtgacagaccctttactgacccctgtggaaaaggcctctctccgagccatgagcctagaagaggcaaagatgcgacgagcagagcttcagagggctcgggctctgcagtcctactatgaggccaaggctcgaagagagaagaaaatcaaaagtaaaaagtatcacaaagtcgtgaagaaaggaaaggccaagaaagccctaaaagagtttgagcagctgcggaaggttaatccagctgcagcactagaagaactggaaaaaattgaaaaggccagaatgatggaaagaatgagccttaagcaccaaaacagtgggaaatgggccaagtcaaaggcaattatggccaaatatgacctggaggctcgccaagctatgcaggaacagttgtctaagaacaaagaactgacacagaaactccaggtagcctctgagagtgaggaagaggagggaggcacagaagatgtggaagaactccttgtccctgatgtagtgaatgaagtgcagatgaatgcagatgggccgaatccctggatgctcaggagctgcaccagtgacaccaaagaggctgcaacccaggaggaccctgagcaactgccagagcttgaggcccatggagtttctgaaagtgagggagaagaaagaccagtggcagaagaagaaattttgttgagagaatttgaggaaaggcgatcccttagaaaaagatctgagctcagccaagatgctgagccagcaggcagtcaagaaacaaaagattctggcagccaggaggtgctgtctgaattgagagtactatctcagaaattgaaggaaaaccatcagtccaggaagcaaaaagcaagttcagaggggactattccccaggtccagagagaggaacctgccccagaagaagaggagcccctgttgctacagagaccagagagagtacagacgctggaagagctagaagagctgggaaaagaagaatgttttcaaaataaggagcttcccagacctgtgttagaagggcagcagtcagagaggaccccaaataatcgccctgatgcccctaaggagaagaaaaagaaggagcaaatgatcgacctacagaacctcctaaccacacaatctccctccgtgaagtctttggcagttcccacaatagaggagctggaagatgaagaggagagaaaccataggcagatgataaaggaagcttttgctggggatgatgtcatcagagatttcttgaaagagaagagggaagctgtggaggcgagtaagccaaaggacgtggacctgacactacctggctggggcgagtggggtggtgtgggcctaaagcccagtgccaagaaaagacgccggtttctcattaaagcccctgagggtcctccaagaaaagataagaatttgccaaatgtgattatcaatgagaagcgcaacatccacgcagctgctcatcaggtacgagtgcttccatatccatttacccaccattggcaatttgaaaggaccatccagacccccataggatccacatggaacacccagagggctttccaaaagctgactactcccaaggtcgtcaccaagccaggccatatcattaaccccataaaagcagaagacgtgggctaccggtcttcctcaaggtcggacctgtctgtcatacagaggaatccaaaacgaatcaccacacgtcacaaaaaacagctgaagaaatgctctgtagattgagttgctggaggagtgacagccaggagccctgacttcacttcctttggtccagttttactctgatacagggtggattccaaaactggctcagtacattgcatgtagttaagccacattttaaaaataaaggcattttttaatctaaaaaaaaaaaaaaaaaaaaaa

SEQ ID NO: 2408 - DNA, 757 bp, Homo sapiens
agatgcgaggtgggcgggggcaggctgaaagttggagcaagcaggaagtgaactgagggccaccctgggaggaagccgactaggcgaattcacttactgaccggcctgggctgctctgagacatggaggaagccagtgaaggtggaggaaatgatcgtgtgcggaacctgcaaagtgaggtggagggagttaagaatattatgacccagaatgtggagcggatcctggcccggggggaaaacttggaacatctccgcaacaagacagaggatctggaagccacatctgagcacttcaagacgacatcgcagaaggtggctcgaaaattctggtggaagaacgtgaagatgattgtccttatctgcgtgattgtttttatcatcatcctcttcattgtgctctttgccactggtgccttctcttaagtaacagggaacctctcccacctgcccttctcttcagggacaaccctccataaatgtgtgccaagagggtctcctttcctgtcttcctctacagagaatgctgctcggtcctcctacccctcttcccgaggccctgctgccatgttgtatgccccagaaggtaccttggtcccccggaaggagagaaaaaagagagatggactgtggctgcatttcttgggtccttagagtgggctggagagacctagagggcccagcatgtggctgggaaactgttggtggccagtgggtaataaagacctttcagtatccctataaaaaaaaaaaaaaaa

SEQ ID NO: 2409 - DNA, 4768 bp, Homo sapiens
atccttgccgcccgccccggcccagccgcgtcccggagccgtcgggcatggagccgtggaagcagtgcgcgcagtggctcatccattgcaaggtgctgcccaccaaccaccgggtgacctgggactcggctcaggtgttcgaccttgcgcagaccctccgcgatggagtcctgctctgccagctgcttaacaacctccgggcgcactccatcaacctgaaggagatcaacctgaggccgcagatgtcccagtttctctgtttgaagaacataaggacatttctcacggcctgttgtgagacgtttggaatgaggaaaagtgaacttttcgaggcatttgacttgtttgatgttcgtgactttggaaaggttatagaaacattatcacgactttctcgaacacctatagcattggccacaggaatcaggcccttcccaacagaagaaagcattaatgatgaagacatctacaaaggccttcctgatttaatagatgaaacccttgtggaagatgaagaagatctctatgactgtgtttatggggaagatgaaggtggagaagtctatgaggacttaatgaaggcagaggaagcacatcagcccaaatgtccagaaaatgatatacgaagttgttgtctagcagaaattaagcagacagaagaaaaatatacagaaactttggagtcaatagaaaagtatttcatggcaccactaaaaagatttctgacagcagcagaatttgattcagtattcatcaacattcctgaacttgtaaaacttcatcggaacctaatgcaagagattcatgattccattgtaaataaaaatgaccagaacttgtaccaagtttttattaactacaaggaaagattggttatttacgggcagtactgcagtggagtggagtcagccatctctagtttagactacatttctaagtcaaaagaagatgtcaaactgaaattagaggaatgttccaaaagagcaaataatgggaaatttactcttcgagacttgcttgtggttcctatgcaacgtgttttaaagtaccaccttctcctccaggaactggtcaaacataccactgatccgactgagaaggcaaatctgaaactggctcttgatgccatgaaggacttggcacaatatgtgaatgaagtgaaaagagataatgagacccttcgtgaaattaaacagtttcagctatctatagagaatttgaaccaaccagttttgctttttggacgacctcagggagatggtgaaattcgaataaccactctagacaagcataccaaacaagaaaggcatatcttcttatttgatttggcagtgatcgtatgtaagagaaaaggtgataactatgaaatgaaggaaataatagatcttcagcagtacaagatagccaataatcctacaaccgataaagaaaacaaaaagtggtcttatggcttctacctcatccatacccaaggacaaaatgggttagaattttattgcaaaacaaaagatttaaagaagaaatggctagaacagtttgaaatggctttgtctaacataagaccagactatgcagactccaatttccacgacttcaagatgcataccttcactcgagtcacatcctgcaaagtctgccagatgctcctgaggggaacattttatcaaggctatttatgttttaagtgtggagcgagagcacacaaagaatgtttgggaagagtagacaattgtggcagagttaattctggtgaacaagggacactcaaactaccagagaaacggaccaatggactgcgaagaactcctaaacaggtggatccaggtttaccaaagatgcaggtcattaggaactattctggaacaccacccccagctctgcatgaaggaccccctttacagctccaggccggggataccgttgaacttctgaaaggagatgcacacagtctgttttggcagggcagaaatttagcatctggagaggttggattttttccaagtgatgcagtcaagccttgcccatgtgtgcccaaaccagtagattattcttgccaaccctggtatgctggagcaatggaaagattgcaagcagagaccgaacttattaatagggtaaatagtacttaccttgtgaggcacaggaccaaagagtcaggagaatatgcaattagcattaagtacaataatgaagcaaagcacatcaagattttaacaagagatggcttttttcacattgcagaaaatagaaaatttaaaagtttaatggaacttgtggagtactacaagcatcattctctcaaggaagggttcagaaccttagatacaactctgcagtttccatacaaggagccagaacattcagctggacagaggggtaatagagcaggcaacagcttgttaagtccaaaagtgctgggcattgccatcgctcggtatgacttctgtgcaagagatatgagagagttgtccttgttgaaaggagatgtggtgaagatttacacaaagatgagtgcaaatggctggtggagaggagaagtaaatggcagggtgggctggtttccatccacatatgtggaagaggatgaataaattcaaatcccgtgttgcaccctgcaccaaaaatttcagagaagggataaatagaagcctgcacagcatcgtgaattaactgaagtgtttaaaaagctgcatttctggctgttcaacatcctccctccttagcccctcctaagtcttaatgctgagatttctaaagatgctggtactgacagattaatggcttgcctagagctgtgcaagaaacagcctgccagtctgtcattgtcagggaccagggcaaaaccaagagctgttcttcccagaagagccctgcaaacacattggttcgtgcttccctttacttcttctggtcagataccatgaatgccagtcatcagtaaatcttaatacacttttgctttattctcacatgccattcaccagattatttgatggtacaaagaagcagaagtgtaattttccttttcccagcatgacgaaaaattggagttctgccatttgagcagcttactggaaagatccagccttacttgtcttaaattgtccaacaaggtgactcattgcccggcaaacacttttaccctcagatgttactcatgatattataaaatatgaggccagtgctcaggtttgcatcataagtgagctatccctgaagggttttaattacttatttggtgtcctgattatatttgcaaacttctttataaaaggtgaaaaaagcacacaaaagagagggtgtcttcatattaaaccttcacaaccttcatgatttcataggattattttggaaatatagcacttgactttatgaaaggatctgggctaggtatattaggggtagttgccaataacctgaagaagctggcattgtttacagaaacagatcaagggctataatttatgtcattttatagcagcagtatctattaatacatgccttttcctcccatccacctcccccgcacacacacaaagatgacctgggacatgatttttttattcccacattttcttggagcacaaacaactttgttgaggattttggaaggaaagcacaactgggtcctttattcatttctgggacagaaagagggtcagtggacttttgtgggcctccagcttctctcagagtctccccctctgcagcccatcctgggagtgtattaactggagggaagatgggtcttgcagtacatttgttttgcccagccatcactcttttttgtgaggagcctaaatacattcttcctggggtccagagtccccattcaaggcagtcaagttaagacactaacttggccctttcctgatggaaatatttcctccatagcagaagttgtgttctgacaagactgagagagttacatgttgggaaaaaaaagaagcattaacttagtagaactgaaccaggagcattaagttctgaaattttgaatcatctctgaaatgaagcaggtgtagcctgccctctcatcaatccgtctgggtgccagaactcaaggttcagtggacacatccccctgttagagaccctcatgggctaggacttttcatctaggatagattcaagacctttacctcagaattatgtaaactgtgattgtgttttagaaaaattattatttgctaaaaccatttaagtctttgtatatgtgtaaatgatcacaaaaatgtattttataaaatgttctgtacaataaagttacacctcaaagtgtactcttggaatggattctttcctgtaaagtcttatctgcgactctgtctcgggaatgttttgtctgttgccgtcagccgaactttgttatggagggagcagcctcacacaagcagaaacactcctgtggatggtattgtagcatgtattgtttattttagtcaatagaccctctccttataaatggtgtttagtcttcctgttgcatttcatgggcctgggggtttcctagcagaggatattggagcccctttttgtgacattaccaattacatctttgtccacgtttaatactttgttttggaaaatttaaatgctgcagatttgtgtagagttctaataccaaagacagaagtaaatgttttccatatactttgtcttgcctgtatgcagcccttgtgtaatatggtgaattagagtggtatttcactttgtattattttgtaaatatgtcaatataataaatagtgactaaaaaaaaaaaaaa

SEQ ID NO: 2410 - DNA, 3859 bp, Homo sapiens
gtgatctgcgggttgctggggagaggcgcggagaggcgggcgagagtccgcagggcaggcgctgattggctgaggtgggagcagcttcccttccgatgattcggctcttctcggctcagtctcagcgaagcgtctgcgaccgtcgtttgagtcgtcgctgccgctgccgctgccactgccactgccacctcgcggatcaggagccagcgttgttcgcccgacgcctcgctgccggtgggaggaagcgagagggaagccgcttgcgggtttgtcgccgctgctcgcccaccgcctggaagagccgagccccggcccagtcggtcgcttgccaccgctcgtagccgttacccgcgggccgccacagccgccggccgggagaggcgcgcgccatggcttctggagccgattcaaaaggtgatgacctatcaacagccattctcaaacagaagaaccgtcccaatcggttaattgttgatgaagccatcaatgaggacaacagtgtggtgtccttgtcccagcccaagatggatgaattgcagttgttccgaggtgacacagtgttgctgaaaggaaagaagagacgagaagctgtttgcatcgtcctttctgatgatacttgttctgatgagaagattcggatgaatagagttgttcggaataaccttcgtgtacgcctaggggatgtcatcagcatccagccatgccctgatgtgaagtacggcaaacgtatccatgtgctgcccattgatgacacagtggaaggcattactggtaatctcttcgaggtataccttaagccgtacttcctggaagcgtatcgacccatccggaaaggagacatttttcttgtccgtggtgggatgcgtgctgtggagttcaaagtggtggaaacagatcctagcccttattgcattgttgctccagacacagtgatccactgcgaaggggagcctatcaaacgagaggatgaggaagagtccttgaatgaagtagggtatgatgacattggtggctgcaggaagcagctagctcagataaaggagatggtggaactgcccctgagacatcctgccctctttaaggcaattggtgtgaagcctcctagaggaatcctgctttacggacctcctggaacaggaaagaccctgattgctcgagctgtagcaaatgagactggagccttcttcttcttgatcaatggtcctgagatcatgagcaaattggctggtgagtctgagagcaaccttcgtaaagcctttgaggaggctgagaagaatgctcctgccatcatcttcattgatgagctagatgccatcgctcccaaaagagagaaaactcatggcgaggtggagcggcgcattgtatcacagttgttgaccctcatggatggcctaaagcagagggcacatgtgattgttatggcagcaaccaacagacccaacagcattgacccagctctacggcgatttggtcgctttgacagggaggtagatattggaattcctgatgctacaggacgcttagagattcttcagatccataccaagaacatgaagctggcagatgatgtggacctggaacaggtagccaatgagactcacgggcatgtgggtgctgacttagcagccctgtgctcagaggctgctctgcaagccatccgcaagaagatggatctcattgacctagaggatgagaccattgatgccgaggtcatgaactctctagcagttactatggatgacttccggtgggccttgagccagagtaacccatcagcactgcgggaaaccgtggtagaggtgccacaggtaacctgggaagacatcgggggcctagaggatgtcaaacgtgagctacaggagctggtccagtatcctgtggagcacccagacaaattcctgaagtttggcatgacaccttccaagggagttctgttctatggacctcctggctgtgggaaaactttgttggccaaagccattgctaatgaatgccaggccaacttcatctccatcaagggtcctgagctgctcaccatgtggtttggggagtctgaggccaatgtcagagaaatctttgacaaggcccgccaagctgccccctgtgtgctattctttgatgagctggattcgattgccaaggctcgtggaggtaacattggagatggtggtggggctgctgaccgagtcatcaaccagatcctgacagaaatggatggcatgtccacaaaaaaaaatgtgttcatcattggcgctaccaaccggcctgacatcattgatcctgccatcctcagacctggccgtcttgatcagctcatctacatcccacttcctgatgagaagtcccgtgttgccatcctcaaggctaacctgcgcaagtccccagttgccaaggatgtggacttggagttcctggctaaaatgactaatggcttctctggagctgacctgacagagatttgccagcgtgcttgcaagctggccatccgtgaatccatcgagagtgagattaggcgagaacgagagaggcagacaaacccatcagccatggaggtagaagaggatgatccagtgcctgagatccgtcgagatcactttgaagaagccatgcgctttgcgcgccgttctgtcagtgacaatgacattcggaagtatgagatgtttgcccagacccttcagcagagtcggggctttggcagcttcagattcccttcagggaaccagggtggagctggccccagtcagggcagtggaggcggcacaggtggcagtgtatacacagaagacaatgatgatgacctgtatggctaagtggtggtggccagcgtgcagtgagctggcctgcctggaccttgttccctgggggtgggggcgcttgcccaggagagggaccaggggtgcgcccacagcctgctccattctccagtctgaacagttcagctacagtctgactctggacagggggtttctgttgcaaaaatacaaaacaaaagcgataaaataaaagcgattttcatttggtaggcggagagtgaattaccaacagggaattgggccttgggcctatgccatttctgttgtagtttggggcagtgcaggggacctgtgtggggtgtgaaccaaggcactactgccacctgccacagtaaagcatctgcacttgactcaatgctgcccgagccctcccttccccctatccaacctgggtaggtgggtaggggccacagttgctggatgtttatatagagagtaggttgatttattttacatgcttttgagttaatgttggaaaactaatcacaagcagtttctaaaccaaaaaatgacatgttgtaaaaggacaataaacgttgggtcaaaatggagcctgagtcctgggccctgtgcctgcttcttttcctgggaacagccttgggctacccaccactcccaaggcattcttccaaatgtgaaatcctggaagtaagattgcaccttcttcctctcctgatcaacatcggtatgatgtctcctgttgcctcaccctttgtctgcagtatcactggataggactggtggaaagggagcagcctgacagagctccaaatgtggagaatatggcatccctccacctatatttgatgtggacggtaaggctaggcctgcaggatcccttatcctgaccaaagactgtgttggggtgccatttgaaaatcgcagggttgcaaaagaatacaatcttacttgcaggtggatattctctatactctcttttaatgcatctaaaaatcccaaacatcccctggttggtgatcacttacagttgtgtccacctttattttatgtactttgattaaaaaaaaaaaactttttgttaatat

SEQ ID NO: 2411 - DNA, 3669 bp, Homo sapiens
gcccaggtaaagccatgttttcctacacttaaaaatgtaaataaatatcccttagataatctggacagcagtttcttatatagcatgtctgagcactatattttgctgggctataaaaggtttaattgttgtttattggtacaataagggattctagttactaatatctacctgtagtcaataaagcaaacattgattggttgatcgaatcattgattcattcaataggtattgattcagcaccagctatgagctaggcagagttctaggccctacagagaaaactgatatcaaactaagaaagtctttttccaagtgctacagtaggggtgggggaggagagagataacaaactggtgagcaaatgttaaacaaaatgattctagagagtgctaaatactgtgaggaagataaaatgataaaataataaagacttctgaagattggttagggtaacctcttgtagaagtatcattggagaccgaaggatgacacaccagccatctgaccatgagagaacatcattcaaggcaaaggaaacagaccaccaccaacaaaaaaagatgcactggggaatttccagtaacacttttgttagctctcttaatatctgattttttgagcactagaacactgcctctcacagaatcctagcttaaaacagcaatgaacagactagaattctaggctaaaaccaacaagatgaaatgtgactgatatgaatataaatggtgcacataagttcacaaacccaattacacagcacaaaatgatatccacgtggcttgacagctgttcatattagaaaaatctagggattctaatggactacatattggagattgctctttgctgttcctgactggaaaaaaaaatatgtagatattacccttgggcagatttcagcccaacttaaagtatcattagagctgtccaaaatggaacagcctgctttgcacatagagaactcacattgctcaactcaaaaaagagcagaaggaaggaagaaggaaggacacgtaacagggatttttacaaaaacagaattcggtatttcttggagactactttaagacagtttttggtttctgtaagtctgtgacttattacttattcctttaattccaataaaattttcttcatttttgttatttttaaaacattaagaagaaaaaaatgatattgatataaggtagatggtgaagtttagcaaaagtttagtttataatgatatctctcaaaatagcaaactgaagtttaaaattcttaagctataattttaaaggaatttagattaaacttttaatatgttgttggctaagtataatacaaaataaaaactaaataaatcttggttttgccacatattagctgtgtaatatagacaatttacttctctgttattgtttcctcagaatgagggcagtaacttgtagccgtctgaaaagattgttataagcatggagttagttgctgtatataaagcagttagaccagtacctgacaatattacatgctaagtaagtgcttgctattactgttgctgttattattaattataattgtgtgctctattctgccttcaggaattaatgaccaagttaataactgagacacctgaccagccaatcccatttctcattgaccatcttcagtctaaacaagggaaccgtggacaacttcaaagaactttgtctggatctgcagctctatgggcagaaagtgaaaaatcagaatccaaaggaacaagaagggatttcagaagctatgataaaccttggcaattaaatgcaaagaagcctaaaaaatcaaaaagtgaccttgctgtgtctaatatttctccaccatcaccggactccaaatcattgccaaggtcagtagagcatccaaagtggaactggaggactaaaccacaaagccgtgattttgatgaattgaatcacatccttcaggagagcaagaagctggggaaagcccttgagaatctctctcgaagtattgcaatttcagatgaactcgataaggaaacagtgacatttaattcttctcttctgaggccccgtgtgattggagaatggattggtagagaagaaaatgatgctgatcccctagctgctgaaatgctacagcctccaattccaagaagcaaaaatgaccaatgggaaagtgaagatagtggctctagtcctgcaggaagcttaaagatggagcctaagaacaaaggattaaaacagcagcaacagcaacataagaaactcctggccgcaatgctctctcaagattcttttgagtccatccacagccctaccccatctgtaacagaagaagatattgataatgaagatgatgcaatggaattgctggaggatcttaatgatttaagaatggagggagtaacaaccctggtaccttctgggagcaaatttaaccaaggccgtcctacttaccctgctgagcctcaggccaaggtcacactgaacatctgttcaaggtgtgccaggcttcaaggagacaacctggaagaaaggacagaagagtcactaccaatactccattctccagatgaaaaaatcccagattcattcgattccttgcctgggactgaagaagcactaatggaggagggtgacgaatttgagaaagcatctaaactaacaggacctggagaagcctccagtggagtaggacactcactgaaaaactacatggaagaagatgaatccttaaagcaattgcaggtagttcatcaaccatggatcttgccaagtgacacagaaagtgaaggagtggaagcagaacaagagaaacgttccgctgatcttcttctttgcgttccatgctcttcttgtcctacgctggtctactctggtttgtgaaacagagagaagaagttgcaagtggtccttaaagaaatgcagttattcaaatccttatgtatagttctaattttatttactatgtgtaatcatttagagaatggttatttttataatctcaataataaacaagtactatcgtagccagggggtgcccaagtatgtaatcagagaacactaatcctggcaaaggattgtggggtggtcaggaggccggctgccttttgacatggttagagtcctgggtttagattactttataaatagttattaagattaatatttgatatattaaatattgcctgattcaaataactttgcttaaaatttttctgtattttaacttgtctagggttttctacttcttctatttttataatattttctcattttttagattactaaacattctacttatccacatgtgccaagatgtgccatttaggtctctgcagaaattagctgtttggtatcatcacctgccatacatgttgtgtgcagcagtgagaagtatattctctaccactgctctttctcatgattattttctctattcctattaaaatgaataattgatatgttaattaagtaaagcaaatcaataaggaatgaaatgcatggcccaaaacatagaaaatgaaaatcgtttgaccatttatccaattattgaacccaattaagatgatccattttaaatttaatatatgctcgcttttggaatgtgttatgcattgatgttaagtgaatggatctaagtaaatctattgatatctctaaaaaaaaaaaaaaaaaa

SEQ ID NO: 2412 - DNA, 4580 bp, Homo sapiens
gtagttttctggacccacgggacgggcaggagctggagctccgtgccgcctgtactcccgccttcatttcccatcgtgctgaggcgggtggcatggcggagaaggatgacaccggagtttgacgaagaggtggtttttgagaattctccactttaccaatacttacaggatctgggacacacagactttgaaatatgttcttctttgtcaccaaaaacagaaaaatgcacaacagagggacaacaaaagcctcctacaagagtcctaccaaaacaaggtatcctgttaaaagtggctgaaaccatcaaaagttggatttttttttctcagtgcaataagaaagatgacttacttcacaagttggatattggattccgactcgactcattacataccatcctgcaacaggaagtcctgttacaagaggatgtggagctgattgagctacttgatcccagtatcctgtctgcagggcaatctcaacaacaggaaaatggacaccttccaacactttgctccctggcaacccctaatatttgggatctctcaatgctatttgccttcattagcttgctcgttatgcttcccacttggtggattgtgtcttcctggctggtatggggagtgattctatttgtgtatctggtcataagagctttgagattatggaggacagccaaactacaagtgaccctaaaaaaatacagcgttcatttggaagatatggccacaaacagccgagcttttactaacctcgtgagaaaagctttacgtctcattcaagaaaccgaagtgatttccagaggatttacactggtcagtgctgcttgcccatttaataaagctggacagcatccaagtcagcatctcatcggtcttcggaaagctgtctaccgaactctaagagccaacttccaagcagcaaggctagctaccctatatatgctgaaaaactaccccctgaactctgagagtgacaatgtaaccaactacatctgtgtggtgccttttaaagagctgggccttggacttagtgaagagcagatttcagaagaggaagcacataactttacagatggcttcagcctgcctgcattgaaggttttgttccaactctgggtggcacagagttcagagttcttcagacggttagccctattactttctacagccaattcacctcctgggcccttacttactccagcacttctgcctcatcgtatcttatctgatgtgactcaaggtctacctcatgctcattctgcctgtttggaagagcttaagcgcagctatgagttctatcggtactttgaaactcagcaccagtcagtaccgcagtgtttatccaaaactcaacagaagtcaagagaactgaataatgttcacacagcagtgcgtagcttgcagctccatctgaaagcattactgaatgaggtaataattcttgaagatgaacttgaaaagcttgtttgtactaaagaaacacaagaactagtgtcagaggcttatcccatcctagaacagaaattaaagttgattcagccccacgttcaagcaagcaacaattgctgggaagaggccatttctcaggtcgacaaactgctacgaagaaatacagataaaaaaggcaagcctgaaatagcatgtgaaaacccacattgtacagtagtacctttgaagcagcctactctacacattgcagacaaagatccaatcccagaggagcaggaattagaagcttatgtagatgatatagatattgatagtgatttcagaaaggatgatttttattacttgtctcaagaagacaaagagagacagaagcgtgagcatgaagaatccaagagggtgctccaagaattaaaatctgtgctgggatttaaagcttcagaggcagaaaggcagaagtggaagcaacttctatttagtgatcatgccgtgttgaaatccttgtctcctgtagacccagtggaacccataagtaattcagaaccatcaatgaattcagatatgggaaaagtcagtaaaaatgatactgaagaggaaagtaataaatccgccacaacagacaatgaaataagtaggactgagtatttatgtgaaaactctctagaaggtaaaaataaagataattcttcaaatgaagtcttcccccaaggagcagaagaaagaatgtgttaccaatgtgagagtgaagatgaaccacaagcagatggaagtggtctgaccactgcccctccaactcccagggactcattacagccctccattaagcagaggctggcacggctacagctgtcaccagattttaccttcactgctggccttgctgcagaagtggctgctagatctctctcctttaccaccatgcaggaacagacttttggtggtgaggaggaagaacaaataatagaagaaaataaaaatgagatagaagaaaagtaagaaccaagattcatatgaagtgatattagattgttccttttacaaaagtgtttagcttcaagactggaaagggaatatgagtgtaagtttactatatataaagctaagatgtggatttacaggaagaaccctggtttgaataactgatctgaaattagtagttacctgtaaatggcagatcttttaggaaaataagagaaaggtaagggctcttttgaataaactgctgttttatttgtggcacaactgatcaatcttggaaattctttaagtatttttaataagaaatgaattatcatttcttgccagaatttgctaccttaaggtgattgggaaaattctgttgcaagaacattaacatttagtatgactcctttttactgtattcttgcagttaataactgcagctattatgttaataacaagttgtttgtattttatttttgtttataccagtcttaaagatccaggttctgaataaaaaaattaattgatacaattgatgtgtgctggggtttggaactaaaagtagtttcaacagtgcgtgggttatgacatttcttatgtttctttgttcatgtgtgtatttagtagttaattttaagatgtcctagtgatctttaaaagaaaaatattgtaccattttttagaattacactttcacctttctttttgcaattgaaagtgatgatgtcaaagtgggatttctgtactccaaggccccacccccaatttagcaagcagaaaaacgttccttgtatcactttaccttggataattgggtgccattaacacaaacaggtcacaatcctgctgttttctagccctgtccaccataatgagattcaggaaacatcctgtcagcctcctggaaagcatccttgtctccttagtatttcatttacaaactacctcttaacagagactgcttttcaaattggccaatcttacctgttttgtgttgtgattgcattttcaaagagtaattattttcagcatatacagttttgaaacctgtagctcctatgcaataacatagttctatagacattatttgggggaaatgtagtaataactcaatctatgttgctgtcctagaaaggaaattgcatgatgaatctagattgtctttagagtaaagaaacacattcaaattcctgtaacttatcactttcagtgagtaaatttacttataccaaaggggattttttttctttcaggaatctaaggaaatttactttttaacctgagaaaaaaacttggttctgctttatataaacagtagagattattgtactataagtgattttgcctttttgccaaaatcctggaactcatctataattaacctcttcggagcaataccttaggttgggccttgctttactacttagaaatagctaaatttcaattttaaaaatctttgtgtgttataactgttaaattattcaataatacttagggtttactttcttatttaaatcacttatttagtttaccgacttcatttttctttggatttagaagaagcaattatggaaaaacttggtaatctctctcaacctataaccttacacaggaagaattagagtttaataatttttaattcttttattgtatgttacttttattacaccagtttgggggaaaatcttcataaaattgtatcagttttattcagtgttctctaaggtgataccttttaattttgaaagactaaataattttaatcgagaatttccagtctttcagtctgatctatttaattcactacttgttacataatccagtgaaaactctacttgttgaaattatgacataaagatcttgcagctttatttgagtatttgttcttttgtgtagtttccatcttttaaaatatttaaaatattttcaagataaagtattatcttctctgcaaaaattcctggagtaattttctctcataatatttgaagtcagtggttctcagttgtattagtggggtaactacatcaaaataaataaagtcttatttttaaaatgcaaattttagaccatactcccagtgattcttagttggtctttttggaatgagccataggtaatgtttatgtccaataaaatctaggaacctcaaaaaaaaaaaaaaaaaa

SEQ ID NO: 2413 - DNA, 2673 bp, Homo sapiens
cagggagtcccaccagcctagtcgccagaccttctgtgggatcatcggacccacctggaaccccacctgacccaagcccacctgctgcagcccactgcctggccatgaccatcacttacacaagccaagtggctaatgcccgcttaggctccttctcccgcctgctgctgtgctggcggggcagcatctacaagctgctatatggcgagttcttaatcttcctgctctgctactacatcatccgctttatttataggctggccctcacggaagaacaacagctgatgtttgagaaactgactctgtattgcgacagctacatccagctcatccccatttccttcgtgctgggcttctacgtgacgctggtcgtgacccgctggtggaaccagtacgagaacctgccgtggcccgaccgcctcatgagcctggtgtcgggcttcgtcgaaggcaaggacgagcaaggccggctgctgcggcgcacgctcatccgctacgccaacctgggcaacgtgctcatcctgcgcagcgtcagcaccgcagtctacaagcgcttccccagcgcccagcacctggtgcaagcaggctttatgactccggcagaacacaagcagttggagaaactgagcctaccacacaacatgttctgggtgccctgggtgtggtttgccaacctgtcaatgaaggcgtggcttggaggtcgaatccgggaccctatcctgctccagagcctgctgaacgagatgaacaccttgcgtactcagtgtggacacctgtatgcctacgactggattagtatcccactggtgtatacacaggtggtgactgtggcggtgtacagcttcttcctgacttgtctagttgggcggcagtttctgaacccagccaaggcctaccctggccatgagctggacctcgttgtgcccgtcttcacgttcctgcagttcttcttctatgttggctggctgaaggtggcagagcagctcatcaacccctttggagaggatgatgatgattttgagaccaactggattgtcgacaggaatttgcaggtgtccctgttggctgtggatgagatgcaccaggacctgcctcggatggagccggacatgtactggaataagcccgagccacagcccccctacacagctgcttccgcccagttccgtcgagcctcctttatgggctccaccttcaacatcagcctgaacaaagaggagatggagttccagcccaatcaggaggacgaggaggatgctcacgctggcatcattggccgcttcctaggcctgcagtcccatgatcaccatcctcccagggcaaactcaaggaccaaactactgtggcccaagagggaatcccttctccacgagggcctgcccaaaaaccacaaggcagccaaacagaacgttaggggccaggaagacaacaaggcctggaagcttaaggctgtggacgccttcaagtctgccccactgtatcagaggccaggctactacagtgccccacagacgcccctcagccccactcccatgttcttccccctagaaccatcagcgccgtcaaagcttcacagtgtcacaggcatagacaccaaagacaaaagcttaaagactgtgagttctggggccaagaaaagttttgaattgctctcagagagcgatggggccttgatggagcacccagaagtatctcaagtgaggaggaaaactgtggagtttaacctgacggatatgccagagatccccgaaaatcacctcaaagaacctttggaacaatcaccaaccaacatacacactacactcaaagatcacatggatccttattgggccttggaaaacagggatgaagcacattcctaacctgcttcctaatggggatgcttcgccagccaggtcctcacctgtgtgtacaccagcaggacactgatccagtcacagccatacagctgtccacactgaagaacatgtcctacaacagcctgaatcaaatggttagcttaatagataaaaatcccagactacttcagcctttaatgccttttattcataaaaactgtgaaagctagactgaaccattggaaacatttaactcagactctggattcagagtcgggaacccttagttctatctgaatccaagacagccacaccttagtatactgcccaaactaatgagtttaataaatacaaatactcgtttctttttgattagtgtgattagaactgaacaacggcacttaaggaatctggaagatagcctggatagatttctgattcatcccaagacctcaaagacaacacctgggtaccaaatttctttatttgaaggaatggtacaaatcaaagaacttaagtggatgttttggtacaacttatagaaaaggtaaaggaaaccccaacatgcatgcactgccttggtgaccagggaagtcaccccacggctatggggaaattagcccgaggcttagctttcattatcactgtctcccagggtgtgcttgtcaaagagatattccgccaagccagattcgggcgctcccatcttgcgcaagttggtcacgtggtcacccaattctttgatggctttcacctgctcattcaggtaatgtgtctcaatgaagtcacacaactgcaaaacaatggggaagacagttagtgggcagctttccca

SEQ ID NO: 2414 - DNA, 16341 bp, Homo sapiens
aggagcggcggggaggaaacgccgcgcagcgccgggctggggcgggcggcccgggacaccgacagatttttctgtgaccatgaaagagagaaataaagaatgatccatgatttctaaacaccttttcctgaggatatagtcatgttggaaggccttgtagcctgggttctcaatacctatttgggaaaatatgtcaataacctgaacactgaccagctctcagttgcacttctcaaaggtgctgttgaattagaaaacttgccattaaagaaagatgccttgaaagaattggaattaccatttgaagtcaaagctggcttcattgggaaagtaacccttcagattcccttttatcgcccccatgtggacccttgggtgatctccatctccagccttcacttaattggagccccagagaaaatacaggatttcaatgatgaaaaggagaagctgttggaaagggaacgtaagaaagcactacttcaagccctggaggagaaatggaagaatgaccgccagcagaaaggggagtcctattggtattcagttaccgcctccgtagttacaaggattgtggagaatattgaattaaaaattcaagatgtccatttacgctttgaagatggtgtcaccaatccctcccatccttttgcttttggcatctgcattaagaatgtgtccatgcaaaatgctgtgaatgagcctgtacagaaactaatgcggaaaaagcaattagacgtagcagaatttagcatctattgggatgtcgattgcactttactgggggatttgcctcagatggagttacaggaggccatggccaggagcatggagagtcgcagccatcactacgtcctggagcctgtgtttgcatctgctcttttgaagagaaactgctccaagaagcccctgcggtctcggcacagtccccgtattgattgtgatattcagctggagaccattcccttgaaactctctcagctgcaataccggcaaatcatggaattcctcaaggagctggaacgaaaggagaggcaggtgaagttccgaaggtggaaacccaaggtggcgatatctaagaactgccgagaatggtggtattttgctttgaatgctaacttgtatgagatcagagagcagaggaaacgttgcacctgggactttatgttgcaccgcgctcgtgatgctgtatcttacactgacaaatatttcaacaagttaaaaggaggcctgctgtccacagatgacaaggaggaaatgtgtcggattgaagaggaacagagctttgaggaattgaagattttgcgtgaactggttcatgatcgatttcacaaacaggaagaactagcagagagtctgcgggagcctcagtttgattctccaggagcctgtccgggagccccagaacccggtggaggcagtgggatgctgcagtatctccagtcctggtttcctggatggggtggctggtacgggcagcagaccccagaagggaatgtggttgagggactgtcagcagagcaacaggagcagtggattcctgaagagatcctgggcactgaggagttttttgaccccactgcagatgcctcgtgtatgaacacgtatacaaagcgagatcatgtctttgccaaactgaatttgcagttgcagcgaggtacagtgactctgttacacaaggagcaaggaactcctcaaatgaatgaaagtgctttcatgcagctcgagttttcagatgtaaaacttctagcagagtctcttcctcgaagaaattcctcgttgctttcagtccggttgggtggactgtttcttcgagacctggctacagaaggaactatgtttcctcttctagtcttccctaatccacaaaaagaagttggcagagtctcacaatcttttggtctacaaactacatctgcagacagaagtgatcattacccagctgcagatccagatggccccgtttttgagatgctgtatgagagaaatccggcgcacagccactttgagaggcggctcaatgtcagcacaaggcccttgaacatcatatacaatccgcaggccattaaaaaagtagcagactttttctacaagggaaaggttcatacctcaggttttggttatcagtctgaacttgagctgagagtggctgaagctgcccgaagacaatataacaagctgaagatgcagaccaaggcagaaatccggcaaactcttgatcgtttgctagtgggtgatttcattgaggagagtaaacgatggaccgtgcggctggatatttctgcccctcaggtgatatttcctgatgatttcaaattcaagaatcctgtgttagttgtcgtggatctaggaagaatgcttttgacgaacacccaagataactccaggaggaaaagtagggatgggtcagcatctgaagagacccagtttagtgatgatgaatataagacccccctggccacacctcctaacaccccacctcccgagtcaagcagcagcaacggagagaaaacacctcccttttctggagttgagttcagtgaagaacagcttcaagcacatttaatgagcacaaagatgtatgagaggtactcgctgtcatttatggacctccagatcatggttggacgagtgaaagacaattggaagcatgtccaggatattgacgtgggaccaacacatgtggtagagaagttcaacgttcacctacagttagagcgtcgattgatttatacttcagatcccaaatatccaggagccgtgctctcaggcaacttaccagacttaaaaatccacattaatgaagataaaatatctgcactaaagaattgctttgctctcctcaccaccccagaaatgaaaacttctgacactcagattaaagaaaagatttttccccaggaggagcagcggggaagtttgcaagactccgtaatgaatttaacccagagcattgtgttgttggagcagcatacccgcgaggttctggtggagtcgcagctcctcctggcggaatttaaagtgaactgtatgcagcttggtgttgagagcaatggccggtacatttctgtgctcaaggtgtttggtaccaatgctcactttgtgaagaggccttatgatgctgaagtctccctaactgttcatggtttgctcctggtggataccatgcagacatatggtgctgattttgaccttttgatggcttcacataagaacttgagctttgatattccaacgggaagccttcgggatagcagggcccagtctcctgtctctggaccgaatgtggcccacttaactgatggagctacactgaacgaccgatcagctactagtgtttcacttgacaaaattcttaccaaagagcaagagtcccttattaagttggaatatcagtttgtgagttcagagtgcccatcgatgaatttagacagtactcttcaggtgatttccctacaggtgaataatttagatattatcctcaatccagagacgattgtggagctaattggttttcttcaaaaatcctttcccaaggaaaaagatgatttaagtcctcaacctttaatgactgattttgaaagaagcttcagagaacaaggaacttaccagtctacatatgaacaaaacactgaggttgcagtggaaatccataggctgaacttactgcttcttcggacagtgggcatggcaaatagagagaaatatggcagaaaaattgcaactgcaagtataggtggcaccaaagttaatgtctcaatgggtagcacgtttgacatgaatggttctcttggctgtttacagcttatggatttgacacaagataacgttaaaaaccagtatgttgtcagcattgggaattctgtaggctatgaaaatatcatcagtgatattggctactttgaatctgtgtttgtcagaatggaagatgcagccctcactgaagctttgagtttcacgtttgttgagagatctaaacaggagtgttttctcaacctgaagatggcttctttacattataaccactctgctaagtttttgaaggagttgacgttatccatggatgaactggaagaaaattttcgaggtatgctgaaaagcgcagccaccaaagtcaccacagtactagctaccaagactgccgagtatagcgagatggtatcgctctttgaaactccaaggaagactcgggaaccctttatcttagaggaaaatgaaatatatgggtttgacctagcttcgtctcatttggacactgtaaagctaatcttgaacataaacattgaatcaccagttgtttctatccctcggaagccggggagtcctgagttgttggtgggacacttgggacagatattcatccagaattttgtggcgggagatgatgaatccagaagtgaccgtctgcaggtggaaatcaaggacattaaactgtattctttgaattgcacccagttggcaggtagagaagctgttgggtctgaaggaagccggatgttttgcccaccttccgggtctggcagtgccaacagtcaggaggaagctcatttcacacgacatgatttctttgaatctttgcatagaggtcaagcttttcacatcctgaacaacaccaccattcagtttaaactggagaagatccctatagagagagaatctgaattgactttttctcttagcccagatgacctgggaacttctagcatcatgaagattgaaggaaaatttgtcaatccagttcaggtggtgttagcaaagcatgtatatgagcaggttttacaaaccctggacaatctcgtgtacagtgaagatctgaataagtatccagccagtgctacctcctccccttgccctgattctcctctgcctcccctcagtacctgtggagaatcttctgttgaaaggaaggagaatggattgttcagccactccagcctttctaacacctctcagaagtcattgtcagtgaaggaagtcaaatcctttactcagattcaagccaccttttgtatatcagagcttcaggttcagctaagtggagatctgactttgggggcccaaggtcttgtgagcttaaagtttcaggactttgaggtggaattcagtaaagaccatccccagactttatctattcagattgccctgcattctctgctgatggaggacttattggagaagaatccagattctaaatataagaacctgatggtgtctcgaggagcccctaagccatctagtttagcacaaaaagaatacctttctcagtcttgcccctcagtgtccaatgtggaatatcctgatatgcctcggtctctcccttcccacatggaagaagctcctaatgtcttccagttgtatcaaaggcccacctctgcgtcccggaaaaagcaaaaggaagtccaagacaaggactatcccttgaccccacctccttctccaacagtggatgagcccaagatacttgttggaaagagtaaatttgatgattccttagtccacatcaacatattcttggtagataagaaacatccagaattctcttccagttacaatcgagttaaccggagcattgatgttgattttaattgcttggatgtgctgatcacactgcaaacctgggttgtgatattagacttttttggaatcggctccactgcagacaaccacgcaatgaggctgcctcctgagggcattctgcacaacgtgaagttggagccacatgcctccatggagtctggacttcaggatccagtgaacaccaaactggatctcaaggttcattcactttctctagtgctgaataagaccaccagtgagcttgccaaagcaaatgtgtccaaattagtagcacacctggaaatgattgagggagacctggccttacagggcagcattgggagtctgtctctaagtgacctcacatgccatggagagttctacagagaacggttcactaccagtggtgaagaagcactcatcttccagacttttaaatacggacggcctgaccctctgctccggagagaacacgacattcgcgtgagcctccggatggcctctgtgcagtatgtgcatactcagcgtttccaggcagaggtggtggccttcattcagcatttcactcagctgcaggatgtcttagggcgccagcgagctgctattgaggggcagacggtgagagatcaagcccagcgctgttcacgggttctcctggatattgaggctggtgctcccgttctcttgatcccagaaagttccagatcaaataatctgattgtagcaaatttggggaagttgaaagtcaaaaataagtttctgtttgctggttttcctggcaccttttccctacaagataaggaatctgtgccttcagcttccccaacgggtattcccaaacacagtctgaggaaaacgacaagcacggaggagcccaggggaacccattcccaggggcagttcacgatgcctcttgctggaatgagcctaggaagcctgaagagtgagtttgtgcccagtacctccaccaagcagcaagggccgcaacccacactgtctgttggccaagagtccagtagtccagaagaccatgtctgcctgctggattgcgttgtcgtggatctccaggacatggacatctttgctgcagagagacatccgagagaatactcgaaggcaccagaggatagtagtggagatctgatcttcccttcctattttgtgcgacagacaggaggaagcctcttaaccgagccttgtaggctgaaattgcaggtggaaaggaatttggacaaagaaataagtcatactgtgccagacatatctatccatggcaatctctcctcagtccactgctctctggatctgtataaatacaagctgatccgcggcttattagagaacaacctgggagaacccatagaggaatttatgcggccttatgatttacaagatccaagaattcatactgtcctgagtggagaagtgtacacctgtatgtgcttcctcattgatatggtgaatgtaagtctggagcttaaagatccaaaaagaaaagaaggtgctgggtccctagccagatttgacttcaagaaatgcaaactgctctatgaaagtttttccaaccaaaccaagtccattaacttggtttcccattccatgatggcttttgacacccgttatgctgggcagaagaccagccctggcatgacgaatgtgttcagctgtatctttcagcccgctaagaacagcagcaccacccaagggtccattcagattgaactacatttcagatctaccaaggattcctcctgctttacagtagttctcaacaatctccgtgtgtttctcatatttgactggctactgttagtccatgattttctccacactcccagtgatattaagaaacaaaatcatgttactccttctcgccaccgtaactctagcagcgaatctgctatagttcccaaaactgtgaagagtggagtagttaccaagcggtcttcccttcctgtgtccaatgaaaggcacctggaggtcaaggtcaatgtaacaggtacggagtttgtggtcattgaagatgtgtcctgcttcgacaccaatgccattattctgaaaggcaccacagtgctcacctataagccccggtttgttgatcgccccttttcaggaagtttgtttggcattgaggtgttttcatgccgactagggaatgagcatgatacagctctttcaattgtggatcccgtacaaattcaaatggagttggtggggaattcttcttatcaaaatagttcaggattgatggatgcattcaatagtgaagatttcccacctgtcctggagattcagttacaagccctggatatcagactctcctataatgatgttcagctgtttcttgccattgcaaaatccatcccagagcaagctaatgctgcagtgccagactcagtggccctggagtcagactccgttggcacttaccttccaggtgcatctcgcgttggagaggaaatcagagaagggacaagacacaccttagatcctgtcttggagttacagctggctaggctgcaggagctgggattcagcatggatgattgtcgcaaagctcttttggcgtgtcaaggccaattgaaaaaggcagcaagttggttgtttaagaatgcggaacctctgaagtctctttccttggcctccaccagccgagatagcccaggggctgtggcagcgccattgatctctggcgtggagatcaaagctgagagtgtgtgcatctgtttcatcgatgactgcatggattgtgatgttcctctcgctgaactcaccttttcccgtctgaattttcttcagcgtgtaagaactagccctgaaggctatgcccacttcaccctttctggagattattataaccgtgctctttcaggctgggagccatttattgagccttggccatgctctgtatcctggcaacagcaggcagctagtcgtctccatcctcctcgactgaagctagaagccaaggccaaacctcgtttggatatcaatatcacttctgtgctaattgaccagtatgtaagtaccaaggaatcgtggatggcagattactgtaaagatgacaaggacatagagtcagctaaatcagaagactggatgggctcttcggtggatcctccatgttttggacaaagcctcccccttgtctaccttagaactaggagtacagccagtctgactaacctagagcaccagatctatgctagagcagaggtgaaaacccccaagcgccggcagccctttgtcccctttgctctgaggaaccacacggggtgcactttgtggtttgccaccctgaccaccacacccaccagagctgcactctctcacagtgggagtccaggggtagttccagaagggaacggaacatttctcgatgatactcacaatgttagtgaatggcgagaagtccttacaggtgaagagattccctttgaatttgaagcaagaggaaagttaagacacagacacacccatgacctccggattcatcaactgcaagtgagagtaaatggctgggagcaagtgagcccagtgtctgtggacaaagtcgggaccttttttcgatatgcagcaccagataaaaattcatcttcctctacgattggcagcccaagcagcagaacaaatattatacatccccaggtttatttctcttcactcccaccagtgcgggtggtctttgcagtgactatggaaggcagtgcacggaaagtcatcactgtccggtcagccctcattgtgaggaacagacttgagacaccaatggaactaagactggatagcccatcagctccagacaagccagtggtgcttcctgctatcatgccaggggattcgtttgctgtgcctttacacctcacttcttggcggctacaggcccggcccaaaggattgggtgtatttttctgtaaggctcccattcattggaccaatgtagtgaagactgcagaaattagtagcagtaaacgagagtgccactctatggacacagaaaaaagccgatttttcaggttttgtgtggctataaagaaagagaattatccagattatatgccctcaaacatattttctgacagtgcaaaacagattttcagacagcctgggcataccatatatctcctgccaactgtggtaatctgcaacttgctaccctgtgaacttgatttttatgttaaaggaatgccaattaatgggacgctgaaacctggcaaggaggcagctctccatacagctgatacatcccagaacattgagctgggggtatcactggagaatttccccctctgtaaagaattgctcattccacctggaacccaaaactatatggtgagaatgcgactctatgacgtcaaccgtcggcagctgaacctcaccatccggattgtgtgtcgagcagaaggatccttaaagatcttcatttctgctccatattggctgattaacaaaacagggttgccactgatcttcagacaggacaatgccaagacagatgctgcaggccagtttgaggagcatgagctggcccgtagcctgagtcctctcttattctgctatgctgacaaagagcagccaaacctctgcacgatgagaatcggaagggggattcatccagaaggcatgccgggctggtgtcagggcttctccctggatggtggtagtggtgtccgagctttgaaagtcatccagcaaggaaaccgcccagggctgatctataacattggtattgatgtcaagaaaggccgaggtcgatacattgatacctgcatggtcatctttgccccccgttacctgttagataataaatcatctcacaagcttgcatttgcacagagggaatttgccaggggacagggaacagccaatcccgaaggttacatttccacccttcctggttccagtgtggtgttccactggcctcggaatgactatgatcagctattgtgtgtcagactgatggacgttcccaattgtatttggtctggaggctttgaagtcaacaagaataattccttccatatcaacatgagggataccttgggaaaatgcttcttcctacgagtggaaattactctccgaggagctacgtataggatctcatttagtgacacagatcagttacctcctcctttccgaattgacaacttttctaaggtcccggttgtctttactcagcatggcgtagctgaacccaggctccggactgaagtgaagcccatgacttcattggattatgcctgggacgaacccaccttgccaccttttatcactctgactgttaaaggggcagggtcctctgagatcaactgcaacatgaatgatttccaggataatcggcagctttattatgaaaatttcatttacattgctgctacatatacattctctggcttgcaggagggaacaggcaggcctgtggcttccaacaaggccattacctgtgcggagctcgttttggatgtctcacccaagacacaaagagtcattttaaaaaagaaggaaccaggaaagcgttctcagctgtggaggatgacaggaacaggaatgctggcccatgagggctcctcagttcctcacaatcccaataagccctcagccgcccgctccaccgaggggtctgccatcttagatattgctggtctcgctgcagtgactgacaacagatacgagccactgatgctgagaaagcctgaccgcaggcgaagcacaactcagacgtggagtttccgagaaggaaaactgacctgtgggttacatgggttggtcgtccaggccaaaggaggactttctggtttgtttgatggagctgaagttgttcttggtcctgacacttccatggagcttttggggccagttccacctgaacaacaatttattaatcaaaaaatgagacctggttctggaatgttatccatcagagtcatcccagatggaccaactagagcactccagataacagatttctgccaccggaaaagcagccgttcatatgaagtggatgaacttcctgtcaccgaacaagagctgcagaaattaaagaatccagatacagagcaggaattggaagtgcttgtgaggttagaaggtggaattgggttgtccttaattaataaagtcccagaagaactggtctttgcaagtcttacaggaatcaatgtgcactatacacagctggcaaccagtcacatgcttgaactcagcatacaggatgtacaggtggacaatcagctcattggtaccacgcagcccttcatgctctatgtgactcccctgagcaatgagaatgaggtcatcgagaccggcccagctgtgcaagtcaacgcagtgaagttccccagtaagagtgcactgaccaacatctacaagcatctgatgatcacagctcagagattcacagtgcaaattgaggagaaactgctcctcaagctgctaagtttctttggctacgatcaagcagaatcagaggtggaaaaatatgatgaaaacctccatgaaaagacagctgagcaaggtggaacaccaattcgatactactttgaaaatctcaaaatcagcattcctcagatcaagctaagtgtgttcacctccaacaagctcccattggatcttaaggccctaaaaagcaccttggggtttcctttgatacggtttgaagacgctgtgattaatctagatccattcactcgggtacatccctatgagaccaaggagttcatcatcaatgatatcctcaaacatttccaggaggaactcctcagccaggcagctcgaatcctgggatcagtggattttcttggcaatcctatggggcttttgaatgatgtttctgaaggggttactggactgataaaatatggaaatgtcgggggcctcatcagaaatgttacacacggagtatcaaactctgctgccaagtttgctggaacattatcagatggcttagggaagacgatggacaatcggcatcagtcagagcgggagtacatcaggtaccatgcagccacaagtggtgaacaccttgtagccggcatccatggcctggctcatggtatcattggtggactgaccagtgttataacttcgacagtggaaggtgtgaaaacagaagggggtgtcagcggtttcatatctggccttggaaaagggcttgttggcactgtaaccaagccagtggcaggcgccctggattttgcatcagaaacagcccaggcggtgagagacacagccacactcagcggccccaggactcaagcacagagggttcggaaaccgcgttgctgcacggggccccaggggctgcttccccgatattctgagagccaggcggaaggacaggagcagctcttcaaactcacagacaacatacaggacgaattcttcatcgctgtggagaacattgacagctactgcgtgctcatctcctccaaagctgtttacttcctgaaaagtggagactacgtggatcgagaagccattttcctagaagtcaaatacgatgacctctaccactgccttgtctccaaagaccatgggaaggtgtatgtgcaggtgaccaagaaagccgtgagcacgagcagtggagtgtccatccccggcccctcccaccagaagcccatggtccatgtgaaatctgaggtccttgctgtcaagttgtcacaagaaataaactacgcaaagagcctctactatgaacagcagcttatgttaagactcagcgaaaaccgagagcagctggagctggactcctgaagccccgctgctgagatgggcgctcccgacacagcgcagacccaccaggaggaaagaggcccagctctcagctgacgatggaggcagaaccggagtcgggtttggggaagttgtcaaggaatgagggaaagtaaatcctcatgaggaaaagtacaaatggaaatcgtattaatttgtgaggcagggagttattttagattatgggaaataatttttaaaggtattggttaaataacgtttaaaaacatgtactgagatgaatctaatttttagattgccctgtattttgttaacatgtatatatgtacaacagtgtgtttgtaaatatataggaacgtttctgaacagggtctgtgctatgtgtaaaggtttgttaactgtaaagtaatataaagttatattggatcttctattgcactaattctagatgtctaattcaggatactgtctatagaaaggcattcttaaaagttaaagaatgttacgtcttagttttggagactaaagtattcccagtaaagtgggttgaggtgagggctgtggtcctgaaagggacgcctttgacatcgtggctgtccagttgggctgtgagctgtggcacccaggactggcgctggcccttcagaaggatctaggagaggggcttgggagcccacttttaatttctcacccccattttacaaagagtgcttagattcttacaaattatgatgtaagttatccatttggctttttcctaactagtcttaccaaacttagggggaaacctgtgctccattaccacatgggtgcaagtcagcattgtaagttttctcaggttattattattagagaggttggaaacattggtaaactctgttgattgagaaggaaaaaaaaagtcccattgaactgttgcaacaaatcagaaatccacataaaagtgctctcctgcctgggcagcaacaaccaagaacaaagccccgggactgttttctttttaataaagccacaggcaggcatcgtagctccacagcccgaggggacacaggatggaaaccccaggatgagaagggagcagggagagttccagaaagggggatgaaataggagtattaaaaagctgcgttggtaagtttttcatggaaccaagatttgacaaaggcatctcttatccttggttttaaattcctgctgggagcaaggcctggtatgagcgccctgggtcttgtttttggtgtttcgcttttctgtaaggattaagcagatagggagaagggaaaaggggcctcactttagaatgaatgagtcaccttgtgatttttaaatttttattttaataaagctaatcaatttctacaaccttgtcacatgtagctgagtctgggatgactcagtggatcagtggatgcgtggaaggttttggtgtttataactcatgacccaaatccttccaagacacaaatgaagctaatcttcttcccctccctttcctctcccacttcccctctgtgtctgtgtctgtgtgtgtgtgtgtgtgtgtgtgtgtgcgcgcgcgcgcgtgcatgcagagaggaaggaagggagctttagcacaagtagctacatagtgttcaaggatcagctttcttgaactccgaggcttggttgcctttgctgaactccaagttagtggattgcagaatggaaacttggcttttgcggcactgggtgagttttagtttgtgtgtgtcttgctggggggtggtgatgattgtctcagcactcacgcactgcacaagatggcagcaggatacagcactgcacaagatggcagctcctctgcagcttcctcctcagcctccctccttgcacccccacaggtttggcttgtggtttttgtcatcagtaacctactgcctgagatcatgatctcttaaaagatgagactctcggaagggttgattgtatgcgtcagtgagccttctatcaccttctggaacaaagtcacttgaaatctcttgatgagattaaggagtttagtgttactaagaaaatctgctttgggccgcagcagtgctgggtgttctcagacctgactgaggaagttagctgcgggctgccctgtgggctggtgcttcaggaggaatccagagaagtgttcagatgccccccttgggctcctttctaattttaatcagctctttaaatagctgcccatctcctgtgattgcacaaccaagcactttgacatttgcaccttaggagaggcagatgttaaaatggaatccaaagaccacctagggcggggctgggtgggagatgggagggccaactgcgagctgctccacttctcagctctcccctgccctgcagccctgggccagacaaggccagaaggtttcaggggcatttgacatcccctcctggttctcaccaggaaaacatccaaagctttggaggaaacaggccctgcccctggctccttaaatgccccgtctctttgtaaactgatattcagccagcaatgcctaagactttgttaagatcatttctactgcttttctttctgcttcaaacacacagttcgtctctgaggaaagtaaaataaatggaataagagtaaattgggtaaggagatatccaaagctacccagtcccttgacccagcacagttggccgacccgtgtcactccctggctgtcgctgcttctctgtgctcactgaagggtgagccaggccagtgcttccccagcccctgggcctggtcactacacagtggaaaacagacaagcggccccttccccaaatcccaagagtgtcttgctgcttggtgggtgctcatcgcaatgttctgaaggctccagggccactttgtttgtaagtatgatctgggcctcaaaataccatagtagctgcttgataaaattctaaaaatatctggttctctattatgtaaacactattacagtcaccagtgtgtgaagactcttgagtctggttctcatatcagagtcatcatttttcttcctgtggaataaaatgccttgtggacttcccaaaaaaaaaaaaaaa

SEQ ID NO: 2415 - DNA, 16266 bp, Homo sapiens
aggagcggcggggaggaaacgccgcgcagcgccgggctggggcgggcggcccgggacaccgacagatttttctgtgaccatgaaagagagaaataaagaatgatccatgatttctaaacaccttttcctgaggatatagtcatgttggaaggccttgtagcctgggttctcaatacctatttgggaaaatatgtcaataacctgaacactgaccagctctcagttgcacttctcaaaggtgctgttgaattagaaaacttgccattaaagaaagatgccttgaaagaattggaattaccatttgaagtcaaagctggcttcattgggaaagtaacccttcagattcccttttatcgcccccatgtggacccttgggtgatctccatctccagccttcacttaattggagccccagagaaaatacaggatttcaatgatgaaaaggagaagctgttggaaagggaacgtaagaaagcactacttcaagccctggaggagaaatggaagaatgaccgccagcagaaaggggagtcctattggtattcagttaccgcctccgtagttacaaggattgtggagaatattgaattaaaaattcaagatgtccatttacgctttgaagatggtgtcaccaatccctcccatccttttgcttttggcatctgcattaagaatgtgtccatgcaaaatgctgtgaatgagcctgtacagaaactaatgcggaaaaagcaattagacgtagcagaatttagcatctattgggatgtcgattgcactttactgggggatttgcctcagatggagttacaggaggccatggccaggagcatggagagtcgcagccatcactacgtcctggagcctgtgtttgcatctgctcttttgaagagaaactgctccaagaagcccctgcggtctcggcacagtccccgtattgattgtgatattcagctggagaccattcccttgaaactctctcagctgcaataccggcaaatcatggaattcctcaaggagctggaacgaaaggagaggcaggtgaagttccgaaggtggaaacccaaggtggcgatatctaagaactgccgagaatggtggtattttgctttgaatgctaacttgtatgagatcagagagcagaggaaacgttgcacctgggactttatgttgcaccgcgctcgtgatgctgtatcttacactgacaaatatttcaacaagttaaaaggaggcctgctgtccacagatgacaaggaggaaatgtgtcggattgaagaggaacagagctttgaggaattgaagattttgcgtgaactggttcatgatcgatttcacaaacaggaagaactagcagagagtctgcgggagcctcagtttgattctccaggagcctgtccgggagccccagaacccggtggaggcagtgggatgctgcagtatctccagtcctggtttcctggatggggtggctggtacgggcagcagaccccagaagggaatgtggttgagggactgtcagcagagcaacaggagcagtggattcctgaagagatcctgggcactgaggagttttttgaccccactgcagatgcctcgtgtatgaacacgtatacaaagcgagatcatgtctttgccaaactgaatttgcagttgcagcgaggtacagtgactctgttacacaaggagcaaggaactcctcaaatgaatgaaagtgctttcatgcagctcgagttttcagatgtaaaacttctagcagagtctcttcctcgaagaaattcctcgttgctttcagtccggttgggtggactgtttcttcgagacctggctacagaaggaactatgtttcctcttctagtcttccctaatccacaaaaagaagttggcagagtctcacaatcttttggtctacaaactacatctgcagacagaagtgatcattacccagctgcagatccagatggccccgtttttgagatgctgtatgagagaaatccggcgcacagccactttgagaggcggctcaatgtcagcacaaggcccttgaacatcatatacaatccgcaggccattaaaaaagtagcagactttttctacaagggaaaggttcatacctcaggttttggttatcagtctgaacttgagctgagagtggctgaagctgcccgaagacaatataacaagctgaagatgcagaccaaggcagaaatccggcaaactcttgatcgtttgctagtgggtgatttcattgaggagagtaaacgatggaccgtgcggctggatatttctgcccctcaggtgatatttcctgatgatttcaaattcaagaatcctgtgttagttgtcgtggatctaggaagaatgcttttgacgaacacccaagataactccaggaggaaaagtagggatgggtcagcatctgaagagacccagtttagtgatgatgaatataagacccccctggccacacctcctaacaccccacctcccgagtcaagcagcagcaacggagagaaaacacctcccttttctggagttgagttcagtgaagaacagcttcaagcacatttaatgagcacaaagatgtatgagaggtactcgctgtcatttatggacctccagatcatggttggacgagtgaaagacaattggaagcatgtccaggatattgacgtgggaccaacacatgtggtagagaagttcaacgttcacctacagttagagcgtcgattgatttatacttcagatcccaaatatccaggagccgtgctctcaggcaacttaccagacttaaaaatccacattaatgaagataaaatatctgcactaaagaattgctttgctctcctcaccaccccagaaatgaaaacttctgacactcagattaaagaaaagatttttccccaggaggagcagcggggaagtttgcaagactccgtaatgaatttaacccagagcattgtgttgttggagcagcatacccgcgaggttctggtggagtcgcagctcctcctggcggaatttaaagtgaactgtatgcagcttggtgttgagagcaatggccggtacatttctgtgctcaaggtgtttggtaccaatgctcactttgtgaagaggccttatgatgctgaagtctccctaactgttcatggtttgctcctggtggataccatgcagacatatggtgctgattttgaccttttgatggcttcacataagaacttgagctttgatattccaacgggaagccttcgggatagcagggcccagtctcctgtctctggaccgaatgtggcccacttaactgatggagctacactgaacgaccgatcagctactagtgtttcacttgacaaaattcttaccaaagagcaagagtcccttattaagttggaatatcagtttgtgagttcagagtgcccatcgatgaatttagacagtactcttcaggtgatttccctacaggtgaataatttagatattatcctcaatccagagacgattgtggagctaattggttttcttcaaaaatcctttcccaaggaaaaagatgatttaagtcctcaacctttaatgactgattttgaaagaagcttcagagaacaaggaacttaccagtctacatatgaacaaaacactgaggttgcagtggaaatccataggctgaacttactgcttcttcggacagtgggcatggcaaatagagagaaatatggcagaaaaattgcaactgcaagtataggtggcaccaaagttaatgtctcaatgggtagcacgtttgacatgaatggttctcttggctgtttacagcttatggatttgacacaagataacgttaaaaaccagtatgttgtcagcattgggaattctgtaggctatgaaaatatcatcagtgatattggctactttgaatctgtgtttgtcagaatggaagatgcagccctcactgaagctttgagtttcacgtttgttgagagatctaaacaggagtgttttctcaacctgaagatggcttctttacattataaccactctgctaagtttttgaaggagttgacgttatccatggatgaactggaagaaaattttcgaggtatgctgaaaagcgcagccaccaaagtcaccacagtactagctaccaagactgccgagtatagcgagatggtatcgctctttgaaactccaaggaagactcgggaaccctttatcttagaggaaaatgaaatatatgggtttgacctagcttcgtctcatttggacactgtaaagctaatcttgaacataaacattgaatcaccagttgtttctatccctcggaagccggggagtcctgagttgttggtgggacacttgggacagatattcatccagaattttgtggcgggagatgatgaatccagaagtgaccgtctgcaggtggaaatcaaggacattaaactgtattctttgaattgcacccagttggcaggtagagaagctgttgggtctgaaggaagccggatgttttgcccaccttccgggtctggcagtgccaacagtcaggaggaagctcatttcacacgacatgatttctttgaatctttgcatagaggtcaagcttttcacatcctgaacaacaccaccattcagtttaaactggagaagatccctatagagagagaatctgaattgactttttctcttagcccagatgacctgggaacttctagcatcatgaagattgaaggaaaatttgtcaatccagttcaggtggtgttagcaaagcatgtatatgagcaggttttacaaaccctggacaatctcgtgtacagtgaagatctgaataagtatccagccagtgctacctcctccccttgccctgattctcctctgcctcccctcagtacctgtggagaatcttctgttgaaaggaaggagaatggattgttcagccactccagcctttctaacacctctcagaagtcattgtcagtgaaggaagtcaaatcctttactcagattcaagccaccttttgtatatcagagcttcaggttcagctaagtggagatctgactttgggggcccaaggtcttgtgagcttaaagtttcaggactttgaggtggaattcagtaaagaccatccccagactttatctattcagattgccctgcattctctgctgatggaggacttattggagaagaatccagattctaaatataagaacctgatggtgtctcgaggagcccctaagccatctagtttagcacaaaaagaatacctttctcagtcttgcccctcagtgtccaatgtggaatatcctgatatgcctcggtctctcccttcccacatggaagaagctcctaatgtcttccagttgtatcaaaggcccacctctgcgtcccggaaaaagcaaaaggaagtccaagacaaggactatcccttgaccccacctccttctccaacagtggatgagcccaagatacttgttggaaagagtaaatttgatgattccttagtccacatcaacatattcttggtagataagaaacatccagaattctcttccagttacaatcgagttaaccggagcattgatgttgattttaattgcttggatgtgctgatcacactgcaaacctgggttgtgatattagacttttttggaatcggctccactgcagacaaccacgcaatgaggctgcctcctgagggcattctgcacaacgtgaagttggagccacatgcctccatggagtctggacttcaggatccagtgaacaccaaactggatctcaaggttcattcactttctctagtgctgaataagaccaccagtgagcttgccaaagcaaatgtgtccaaattagtagcacacctggaaatgattgagggagacctggccttacagggcagcattgggagtctgtctctaagtgacctcacatgccatggagagttctacagagaacggttcactaccagtggtgaagaagcactcatcttccagacttttaaatacggacggcctgaccctctgctccggagagaacacgacattcgcgtgagcctccggatggcctctgtgcagtatgtgcatactcagcgtttccaggcagaggtggtggccttcattcagcatttcactcagctgcaggatgtcttagggcgccagcgagctgctattgaggggcagacggtgagagatcaagcccagcgctgttcacgggttctcctggatattgaggctggtgctcccgttctcttgatcccagaaagttccagatcaaataatctgattgtagcaaatttggggaagttgaaagtcaaaaataagtttctgtttgctggttttcctggcaccttttccctacaagataaggaatctgtgccttcagcttccccaacgggtattcccaaacacagtctgaggaaaacgacaagcacggaggagcccaggggaacccattcccaggggcagttcacgatgcctcttgctggaatgagcctaggaagcctgaagagtgagtttgtgcccagtacctccaccaagcagcaagggccgcaacccacactgtctgttggccaagagtccagtagtccagaagaccatgtctgcctgctggattgcgttgtcgtggatctccaggacatggacatctttgctgcagagagacatccgagagaatactcgaaggcaccagaggatagtagtggagatctgatcttcccttcctattttgtgcgacagacaggaggaagcctcttaaccgagccttgtaggctgaaattgcaggtggaaaggaatttggacaaagaaataagtcatactgtgccagacatatctatccatggcaatctctcctcagtccactgctctctggatctgtataaatacaagctgatccgcggcttattagagaacaacctgggagaacccatagaggaatttatgcggccttatgatttacaagatccaagaattcatactgtcctgagtggagaagtgtacacctgtatgtgcttcctcattgatatggtgaatgtaagtctggagcttaaagatccaaaaagaaaagaaggtgctgggtccctagccagatttgacttcaagaaatgcaaactgctctatgaaagtttttccaaccaaaccaagtccattaacttggtttcccattccatgatggcttttgacacccgttatgctgggcagaagaccagccctggcatgacgaatgtgttcagctgtatctttcagcccgctaagaacagcagcaccacccaagggtccattcagattgaactacatttcagatctaccaaggattcctcctgctttacagtagttctcaacaatctccgtgtgtttctcatatttgactggctactgttagtccatgattttctccacactcccagtgatattaagaaacaaaatcatgttactccttctcgccaccgtaactctagcagcgaatctgctatagttcccaaaactgtgaagagtggagtagttaccaagcggtcttcccttcctgtgtccaatgaaaggcacctggaggtcaaggtcaatgtaacaggtacggagtttgtggtcattgaagatgtgtcctgcttcgacaccaatgccattattctgaaaggcaccacagtgctcacctataagccccggtttgttgatcgccccttttcaggaagtttgtttggcattgaggtgttttcatgccgactagggaatgagcatgatacagctctttcaattgtggatcccgtacaaattcaaatggagttggtggggaattcttcttatcaaaatagttcaggattgatggatgcattcaatagtgaagatttcccacctgtcctggagattcagttacaagccctggatatcagactctcctataatgatgttcagctgtttcttgccattgcaaaatccatcccagagcaagctaatgctgcagtgccagactcagtggccctggagtcagactccgttggcacttaccttccaggtgcatctcgcgttggagaggaaatcagagaagggacaagacacaccttagatcctgtcttggagttacagctggctaggctgcaggagctgggattcagcatggatgattgtcgcaaagctcttttggcgtgtcaaggccaattgaaaaaggcagcaagttggttgtttaagaatgcggaacctctgaagtctctttccttggcctccaccagccgagatagcccaggggctgtggcagcgccattgatctctggcgtggagatcaaagctgagagtgtgtgcatctgtttcatcgatgactgcatggattgtgatgttcctctcgctgaactcaccttttcccgtctgaattttcttcagcgtgtaagaactagccctgaaggctatgcccacttcaccctttctggagattattataaccgtgctctttcaggctgggagccatttattgagccttggccatgctctgtatcctggcaacagcaggcagctagtcgtctccatcctcctcgactgaagctagaagccaaggccaaacctcgtttggatatcaatatcacttctgtgctaattgaccagtatgtaagtaccaaggaatcgtggatggcagattactgtaaagatgacaaggacatagagtcagctaaatcagaagactggatgggctcttcggtggatcctccatgttttggacaaacagaggtgaaaacccccaagcgccggcagccctttgtcccctttgctctgaggaaccacacggggtgcactttgtggtttgccaccctgaccaccacacccaccagagctgcactctctcacagtgggagtccaggggtagttccagaagggaacggaacatttctcgatgatactcacaatgttagtgaatggcgagaagtccttacaggtgaagagattccctttgaatttgaagcaagaggaaagttaagacacagacacacccatgacctccggattcatcaactgcaagtgagagtaaatggctgggagcaagtgagcccagtgtctgtggacaaagtcgggaccttttttcgatatgcagcaccagataaaaattcatcttcctctacgattggcagcccaagcagcagaacaaatattatacatccccaggtttatttctcttcactcccaccagtgcgggtggtctttgcagtgactatggaaggcagtgcacggaaagtcatcactgtccggtcagccctcattgtgaggaacagacttgagacaccaatggaactaagactggatagcccatcagctccagacaagccagtggtgcttcctgctatcatgccaggggattcgtttgctgtgcctttacacctcacttcttggcggctacaggcccggcccaaaggattgggtgtatttttctgtaaggctcccattcattggaccaatgtagtgaagactgcagaaattagtagcagtaaacgagagtgccactctatggacacagaaaaaagccgatttttcaggttttgtgtggctataaagaaagagaattatccagattatatgccctcaaacatattttctgacagtgcaaaacagattttcagacagcctgggcataccatatatctcctgccaactgtggtaatctgcaacttgctaccctgtgaacttgatttttatgttaaaggaatgccaattaatgggacgctgaaacctggcaaggaggcagctctccatacagctgatacatcccagaacattgagctgggggtatcactggagaatttccccctctgtaaagaattgctcattccacctggaacccaaaactatatggtgagaatgcgactctatgacgtcaaccgtcggcagctgaacctcaccatccggattgtgtgtcgagcagaaggatccttaaagatcttcatttctgctccatattggctgattaacaaaacagggttgccactgatcttcagacaggacaatgccaagacagatgctgcaggccagtttgaggagcatgagctggcccgtagcctgagtcctctcttattctgctatgctgacaaagagcagccaaacctctgcacgatgagaatcggaagggggattcatccagaaggcatgccgggctggtgtcagggcttctccctggatggtggtagtggtgtccgagctttgaaagtcatccagcaaggaaaccgcccagggctgatctataacattggtattgatgtcaagaaaggccgaggtcgatacattgatacctgcatggtcatctttgccccccgttacctgttagataataaatcatctcacaagcttgcatttgcacagagggaatttgccaggggacagggaacagccaatcccgaaggttacatttccacccttcctggttccagtgtggtgttccactggcctcggaatgactatgatcagctattgtgtgtcagactgatggacgttcccaattgtatttggtctggaggctttgaagtcaacaagaataattccttccatatcaacatgagggataccttgggaaaatgcttcttcctacgagtggaaattactctccgaggagctacgtataggatctcatttagtgacacagatcagttacctcctcctttccgaattgacaacttttctaaggtcccggttgtctttactcagcatggcgtagctgaacccaggctccggactgaagtgaagcccatgacttcattggattatgcctgggacgaacccaccttgccaccttttatcactctgactgttaaaggggcagggtcctctgagatcaactgcaacatgaatgatttccaggataatcggcagctttattatgaaaatttcatttacattgctgctacatatacattctctggcttgcaggagggaacaggcaggcctgtggcttccaacaaggccattacctgtgcggagctcgttttggatgtctcacccaagacacaaagagtcattttaaaaaagaaggaaccaggaaagcgttctcagctgtggaggatgacaggaacaggaatgctggcccatgagggctcctcagttcctcacaatcccaataagccctcagccgcccgctccaccgaggggtctgccatcttagatattgctggtctcgctgcagtgactgacaacagatacgagccactgatgctgagaaagcctgaccgcaggcgaagcacaactcagacgtggagtttccgagaaggaaaactgacctgtgggttacatgggttggtcgtccaggccaaaggaggactttctggtttgtttgatggagctgaagttgttcttggtcctgacacttccatggagcttttggggccagttccacctgaacaacaatttattaatcaaaaaatgagacctggttctggaatgttatccatcagagtcatcccagatggaccaactagagcactccagataacagatttctgccaccggaaaagcagccgttcatatgaagtggatgaacttcctgtcaccgaacaagagctgcagaaattaaagaatccagatacagagcaggaattggaagtgcttgtgaggttagaaggtggaattgggttgtccttaattaataaagtcccagaagaactggtctttgcaagtcttacaggaatcaatgtgcactatacacagctggcaaccagtcacatgcttgaactcagcatacaggatgtacaggtggacaatcagctcattggtaccacgcagcccttcatgctctatgtgactcccctgagcaatgagaatgaggtcatcgagaccggcccagctgtgcaagtcaacgcagtgaagttccccagtaagagtgcactgaccaacatctacaagcatctgatgatcacagctcagagattcacagtgcaaattgaggagaaactgctcctcaagctgctaagtttctttggctacgatcaagcagaatcagaggtggaaaaatatgatgaaaacctccatgaaaagacagctgagcaaggtggaacaccaattcgatactactttgaaaatctcaaaatcagcattcctcagatcaagctaagtgtgttcacctccaacaagctcccattggatcttaaggccctaaaaagcaccttggggtttcctttgatacggtttgaagacgctgtgattaatctagatccattcactcgggtacatccctatgagaccaaggagttcatcatcaatgatatcctcaaacatttccaggaggaactcctcagccaggcagctcgaatcctgggatcagtggattttcttggcaatcctatggggcttttgaatgatgtttctgaaggggttactggactgataaaatatggaaatgtcgggggcctcatcagaaatgttacacacggagtatcaaactctgctgccaagtttgctggaacattatcagatggcttagggaagacgatggacaatcggcatcagtcagagcgggagtacatcaggtaccatgcagccacaagtggtgaacaccttgtagccggcatccatggcctggctcatggtatcattggtggactgaccagtgttataacttcgacagtggaaggtgtgaaaacagaagggggtgtcagcggtttcatatctggccttggaaaagggcttgttggcactgtaaccaagccagtggcaggcgccctggattttgcatcagaaacagcccaggcggtgagagacacagccacactcagcggccccaggactcaagcacagagggttcggaaaccgcgttgctgcacggggccccaggggctgcttccccgatattctgagagccaggcggaaggacaggagcagctcttcaaactcacagacaacatacaggacgaattcttcatcgctgtggagaacattgacagctactgcgtgctcatctcctccaaagctgtttacttcctgaaaagtggagactacgtggatcgagaagccattttcctagaagtcaaatacgatgacctctaccactgccttgtctccaaagaccatgggaaggtgtatgtgcaggtgaccaagaaagccgtgagcacgagcagtggagtgtccatccccggcccctcccaccagaagcccatggtccatgtgaaatctgaggtccttgctgtcaagttgtcacaagaaataaactacgcaaagagcctctactatgaacagcagcttatgttaagactcagcgaaaaccgagagcagctggagctggactcctgaagccccgctgctgagatgggcgctcccgacacagcgcagacccaccaggaggaaagaggcccagctctcagctgacgatggaggcagaaccggagtcgggtttggggaagttgtcaaggaatgagggaaagtaaatcctcatgaggaaaagtacaaatggaaatcgtattaatttgtgaggcagggagttattttagattatgggaaataatttttaaaggtattggttaaataacgtttaaaaacatgtactgagatgaatctaatttttagattgccctgtattttgttaacatgtatatatgtacaacagtgtgtttgtaaatatataggaacgtttctgaacagggtctgtgctatgtgtaaaggtttgttaactgtaaagtaatataaagttatattggatcttctattgcactaattctagatgtctaattcaggatactgtctatagaaaggcattcttaaaagttaaagaatgttacgtcttagttttggagactaaagtattcccagtaaagtgggttgaggtgagggctgtggtcctgaaagggacgcctttgacatcgtggctgtccagttgggctgtgagctgtggcacccaggactggcgctggcccttcagaaggatctaggagaggggcttgggagcccacttttaatttctcacccccattttacaaagagtgcttagattcttacaaattatgatgtaagttatccatttggctttttcctaactagtcttaccaaacttagggggaaacctgtgctccattaccacatgggtgcaagtcagcattgtaagttttctcaggttattattattagagaggttggaaacattggtaaactctgttgattgagaaggaaaaaaaaagtcccattgaactgttgcaacaaatcagaaatccacataaaagtgctctcctgcctgggcagcaacaaccaagaacaaagccccgggactgttttctttttaataaagccacaggcaggcatcgtagctccacagcccgaggggacacaggatggaaaccccaggatgagaagggagcagggagagttccagaaagggggatgaaataggagtattaaaaagctgcgttggtaagtttttcatggaaccaagatttgacaaaggcatctcttatccttggttttaaattcctgctgggagcaaggcctggtatgagcgccctgggtcttgtttttggtgtttcgcttttctgtaaggattaagcagatagggagaagggaaaaggggcctcactttagaatgaatgagtcaccttgtgatttttaaatttttattttaataaagctaatcaatttctacaaccttgtcacatgtagctgagtctgggatgactcagtggatcagtggatgcgtggaaggttttggtgtttataactcatgacccaaatccttccaagacacaaatgaagctaatcttcttcccctccctttcctctcccacttcccctctgtgtctgtgtctgtgtgtgtgtgtgtgtgtgtgtgtgtgcgcgcgcgcgcgtgcatgcagagaggaaggaagggagctttagcacaagtagctacatagtgttcaaggatcagctttcttgaactccgaggcttggttgcctttgctgaactccaagttagtggattgcagaatggaaacttggcttttgcggcactgggtgagttttagtttgtgtgtgtcttgctggggggtggtgatgattgtctcagcactcacgcactgcacaagatggcagcaggatacagcactgcacaagatggcagctcctctgcagcttcctcctcagcctccctccttgcacccccacaggtttggcttgtggtttttgtcatcagtaacctactgcctgagatcatgatctcttaaaagatgagactctcggaagggttgattgtatgcgtcagtgagccttctatcaccttctggaacaaagtcacttgaaatctcttgatgagattaaggagtttagtgttactaagaaaatctgctttgggccgcagcagtgctgggtgttctcagacctgactgaggaagttagctgcgggctgccctgtgggctggtgcttcaggaggaatccagagaagtgttcagatgccccccttgggctcctttctaattttaatcagctctttaaatagctgcccatctcctgtgattgcacaaccaagcactttgacatttgcaccttaggagaggcagatgttaaaatggaatccaaagaccacctagggcggggctgggtgggagatgggagggccaactgcgagctgctccacttctcagctctcccctgccctgcagccctgggccagacaaggccagaaggtttcaggggcatttgacatcccctcctggttctcaccaggaaaacatccaaagctttggaggaaacaggccctgcccctggctccttaaatgccccgtctctttgtaaactgatattcagccagcaatgcctaagactttgttaagatcatttctactgcttttctttctgcttcaaacacacagttcgtctctgaggaaagtaaaataaatggaataagagtaaattgggtaaggagatatccaaagctacccagtcccttgacccagcacagttggccgacccgtgtcactccctggctgtcgctgcttctctgtgctcactgaagggtgagccaggccagtgcttccccagcccctgggcctggtcactacacagtggaaaacagacaagcggccccttccccaaatcccaagagtgtcttgctgcttggtgggtgctcatcgcaatgttctgaaggctccagggccactttgtttgtaagtatgatctgggcctcaaaataccatagtagctgcttgataaaattctaaaaatatctggttctctattatgtaaacactattacagtcaccagtgtgtgaagactcttgagtctggttctcatatcagagtcatcatttttcttcctgtggaataaaatgccttgtggacttcccaaaaaaaaaaaaaaa

SEQ ID NO: 2416 - DNA, 3113 bp, Homo sapiens
tgccgccgctccctactctgggggttgggactacctccttttccgcgggccccgcccaggcggctgcccgtgacctgcctgggcgcggggaactgaaagccggaaggggcaagacgggttcagttcgtcatggggctgtttggaaagacccaggagaagccgcccaaagaactgatatccaaagagaagaagaaaaagtgaaacgatctgtgaaagatgctgccaagaagggccagaaggatgtctgcatagttctggccaaggagatgatcaggtcaaggaaggctgtgagcaagctgtatgcatccaaagcacacatgaactcagtgctcatggggatgaagaaccagctcgcggtcttgcgagtggctggttccctgcagaagagcacagaagtgatgaaggccatgcaaagtcttgtgaagattccagagattcaggccaccatgagggagttgtccaaagaaatgatgaaggctgggatcatagaggagatgttagaggacacttttgaaagcatggacgatcaggaagaaatggaggaagaagcagaaatggaaattgacagaattctctttgaaattacagcaggggccttgggcaaagcacccagtaaagtgactgatgcccttccagagccagaacctccaggagcgatggctgcctcagaggatgaggaggaggaggaagaggctctggaggccatgcagtcccggctggccacactccgcagctaggggctgcctaccccgctgggtgtgcacacactcctctcaagagctgccattttatgtgtctcttgcactacacctctgttgtgaggactaccattttggagaaggttctgtttgtctcttttcattctctgcccaggttttgggatcgcaaagggattgttcttataaaagtggcataaataaatgcatcatttttaggagtatagacagatatatcttattgtggggaggggaaagaaatccatctgctcatgaagcacttctgaaaatataggtgattgcctgaatgtcgaagactctacttttgtctataaaacactatataaatgaattttaataaatttttgctttagcacttggccccattgtagattgccctgtgcagtaaactttcaaggtgtcggctgccccagattgcttcatttgctgggtgtggaaagagttgctatggccaggcatatgggatttggaagctcagcagaagtgacttctgctctgtggttgctgctccccggctttcacagacatggtatggcagccattcttttatctatttaaccaagaggatgctggggaattgtgctgcttgtcctgttggctggtggctgcattatgtcctggggtgtgcatgtgggtctatttagagcttctgtcccttccttcccattgcaagttgcacccagatgagacagctgtagtactaggtctctttcacctctcattgcctgtccctgcttcgagctggttgtcttgtgcgtgggacatgggccttcctatctgtgttttctcaaagtcaggagctgaccaggagcacactaaggtgtggtcatgcatcataaccaacattcactcatctgggacattcttaagatacatttataaatcatttcagcagtagtactttgtatgtgttgagagtttacagagctctttgacatacgcgatcttagtctttacaaataaggaaaacagctcagtttgggaagtatcagagatgggattcaaacccagatcctctggtccaagttgtatgtgcactgaactaatcaggcaggaaaaaagcccagccactgtctcacagattgttttttgtatattgtagcaaaatcctgaaacaatggggtccttccagtctcatcatacaaaatggcaatcttggctgggtgcggtggttcatgcctataatcccagtgctttacaaggctgaggcaggaggctctcttgagaataggagttcaagaccagcctgggcaacatagcaagatcctgtctctccaaaaaaaaaaaaaaaaaaaaaaaaaaatttcatttttgagtccagaggaccctcctattactcttgatttcatcttcagagtgtagttaaaaaattattttaaataattatttttttaaatcagttgtaggttcacagcaaaagtggacaaaaagaaatttctcatatatcccctgccctcacacatgcatagcctcccaccactatcagtatcccacaccagagtggtacatttgttacaatcaataaacctccattgacacatcattatcacccaaagtccatagtttacatgaagattcactctggtgttgtacattgtatgggcttagacaaatgtatgatgatatctacaattatagaatcatacagaatagtttcactgccctaaaacttctctatgcttcacctgttcatccctttcttccctaatcccctggcaaccactttaaaaaaaaaattaggttcagggggtacatgtgcaggtaaactcgtgacaagggggtttgttatacagattatttagtgacccaggtactaagcctagtacccaatagttacttttctggtcctgtcccttttcccaccctccaccctcaggtaggccccagtatgttattcctttgtgtccatgttatttcactcccacttgtgagaacatggaatatttggtttcctgttcctatgttagtttgttaaggataatggcctccagccccatccatgttcctgcaaaggacatgatctttctttggcaaccactttttactgtcgccatagttcttccttttctagaatgtcatattggaatcatatagtatgtagccttttcagactggcttctttcacttaataatatgcaattaaggttcctccatgtcatttcatggcttaatagtgcatttatttttagcactgaataatactccattgtctagatgaatagtttatccattcacctattgaaagacttcttggtggtttccaagttttggcaattatgaataaagctgttgtaaacatctttgtgcaggtttttctatgggcatgtttttaattcatttgaataaataccaagagcttcagtgctggatcataaa

SEQ ID NO: 2417 - DNA, 1687 bp, Homo sapiens
gaaggggccggcgccgctgccgagttacgagtcggcgaaagcggcgggaagttcgtactgggcagaacgcgacgggtctgcggcttaggtgaaaatgcctcgtgtaaaagcagctcaagctggaagacagagctctgcaaagagacatcttgcagaacaatttgcagttggagagataataactgacatggcaaaaaaggaatggaaagtaggattacccattggccaaggaggctttggctgtatatatcttgctgatatgaattcttcagagtcagttggcggtgatgcaccttgtgttgtaaaagtggaacccagtgacaatggacctctttttactgaattaaagttctaccaacgagctgcaaaaccagagcaaattcagaaatggattcgtacccgtaagctgaagtacctgggtgttcctaagtattgggggtctggtctacatgacaaaaatggaaaaagttacaggtttatgataatggatcgctttgggagtgaccttcagaaaatatatgaagcaaatgccaaaaggttttctcggaaaactgtcttgcagctaagcttaagaattctggatattctggaatatattcacgagcatgagtatgtgcatggagatatcaaggcctcaaatcttcttctgaactacaagaatcctgaccaggtgtacttggtagattatggccttgcttatcggtactgcccagaaggagttcataaagaatacaaagaagaccccaaaagatgtcacgatggcactattgaattcacgagcatcgatgcacacaatggtgtggccccatcaagacgtggtgatttggaaatacttggttattgcatgatccaatggcttactggccatcttccttgggaggacaatttgaaagatcctaaatatgttagagattccaaaattagatacagagaaaatattgcaagtttgatggacaaatgttttcctgagaaaaacaaaccaggtgaaattgccaaatacatggaaacagtgaaattactagactacactgaaaaacctctttatgaaaatttacgtgacattcttttgcaaggactaaaagctataggaagtaaggatgatggcaaattggacctcagtgttgtggagaatggaggtttgaaagcaaaaacaataacaaagaagcgaaagaaagaaattgaagaaagcaaggaacctggtgttgaagatacggaatggtcaaacacacagacagaggaggccatacagacccgttcaagaaccagaaagagagtccagaagtaattcagatgctgtgaaccagatttccttttctttgttttcttttgacttttttctccttttctatttgaactgttttattttcctgtgagtcttgcgaggtggaagtaatgattaaatactcatgtgttcagaaaacataaactttttttataaaaatattttgtacaattcattaaaggctaatttatgaaatttgaaaatcttcaggttatactccttaagttatcccaaagccgtgtgtttgtgatgttttggagtacatatatatgaaaattattatgacacgcacttttctaatcattgtacatttctcagagtggataaaaatgtttgacaaagtcctcacttttaaggaaatgcaaagcttaaaataaaactctcttttgtttgatgcaaacacac

SEQ ID NO: 2418 - DNA, 2129 bp, Homo sapiens
gatgagcaatgagggaataatccccattccgtctggaatcagagggcgggcctgccgcggaggcatctgggaaacggagttcccaggcaggcgaagcccaggggccgtcaggaagtcagcggcgcctgcgcgggcgcctcagattcaggatgcgcgcgcagcgctctccgcccagcggaagttttcgctgggcaactgagaaggtgagtccgggtaactgcggaggatccgagggtcaggctgcagaagcccagaatcccaccccagtccccaagtacagaggtcgctgtcaagatggagtttccaacccagtaaatccaagggccagaccgtgacctcataaagcatgatctccttctgtccagactgtggcaaaagtatccaagcggcattcaaattctgcccctactgtggaaattctttgcctgtagaggagcatgtagggtcccagacctttgtcaatccacatgtgtcatccttccaaggctcaaagagagggctgaactccagttttgaaacctctcctaagaaagtgaaatggtccagcaccgtcacctctccccgattatccctcttctcagatggtgacagttctgagtctgaagatactctgagttcctctgagagatccaaaggctccgggagcagacccccaacccccaaaagcagccctcagaagaccaggaagagccctcaggtgaccaggggtagccctcagaagaccagctgtagccctcagaagaccaggcagagccctcagacgctgaagcggagccgagtgaccacctcacttgaagctttgcccacagggacagtgctgacagacaagagtgggcgacagtggaagctgaagtccttccagaccagggacaaccagggcattctctatgaagctgcacccacctccaccctcacctgtgactcaggaccacagaagcaaaagttctcactcaaactggatgccaaggatgggcgcttgttcaatgagcagaacttcttccagcgggccgccaagcctctgcaagtcaacaagtggaagaagctgtactcgaccccactgctggccatccctacctgcatgggtttcggtgttcaccaggacaaatacaggttcttggtgttacccagcctggggaggagccttcagtcggccctggatgtcagcccaaagcatgtgctgtcagagaggtctgtgctgcaggtggcctgccggctgctggatgccctggagttcctccatgagaatgagtatgttcatggaaatgtgacagctgaaaatatctttgtggatccagaggaccagagtcaggtgactttggcaggctatggcttcgccttccgctattgcccaagtggcaaacacgtggcctacgtggaaggcagcaggagccctcacgagggggaccttgagttcattagcatggacctgcacaagggatgcgggccctcccgccgcagcgacctccagagcctgggctactgcatgctgaagtggctctacgggtttctgccatggacaaattgccttcccaacactgaggacatcatgaagcaaaaacagaagtttgttgataagccggggcccttcgtgggaccctgcggtcactggatcaggccctcagagaccctgcagaagtacctgaaggtggtgatggccctcacgtatgaggagaagccgccctacgccatgctgaggaacaacctagaagctttgctgcaggatctgcgtgtgtctccatatgaccccattggcctcccgatggtgccctaggtggaatccagaactttccatttgcagtgtgcaacagaaaaaaaaaaatgaagtaatgtgactcaaggcctgctgtttaatcacagataagcttctagaacaagccctggaatgtgcattcctgccactggtttcaggatactcatcagtcctgattagcctcccggagggccccagtttccctcccgtgaatgtgaagttccccatcttggtggcctgcccttcagccagtgtcctagcaaagctggatggggttgggccggcccacaggggggacccctcctacccttgacacctctgtgctttggtaataaattgttttaccagagaaaaaaaaaaaaaaaaaaaaaaaaaaaaa

SEQ ID NO: 2419 - DNA, 1979 bp, Homo sapiens
gatgagcaatgagggaataatccccattccgtctggaatcagagggcgggcctgccgcggaggcatctgggaaacggagttcccaggcaggcgaagcccaggggccgtcaggaagtcagcggcgcctgcgcgggcgcctcagattcaggatgcgcgcgcagcgctctccgcccagcggaagttttcgctgggcaactgagaaggtgagtccgggtaactgcggaggatccgagggtcaggctgcagaagcccagaatcccaccccagtccccaagtacagaggtcgctgtcaagatggagtttccaacccagtaaatccaagggccagaccgtgacctcataaagcatgatctccttctgtccagactgtggcaaaagtatccaagcggcattcaaattctgcccctactgtggaaattctttgcctgtagaggagcatgtagggtcccagacctttgtcaatccacatgtgtcatccttccaaggctccgggagcagacccccaacccccaaaagcagccctcagaagaccaggaagagccctcaggtgaccaggggtagccctcagaagaccagctgtagccctcagaagaccaggcagagccctcagacgctgaagcggagccgagtgaccacctcacttgaagctttgcccacagggacagtgctgacagacaagagtgggcgacagtggaagctgaagtccttccagaccagggacaaccagggcattctctatgaagctgcacccacctccaccctcacctgtgactcaggaccacagaagcaaaagttctcactcaaactggatgccaaggatgggcgcttgttcaatgagcagaacttcttccagcgggccgccaagcctctgcaagtcaacaagtggaagaagctgtactcgaccccactgctggccatccctacctgcatgggtttcggtgttcaccaggacaaatacaggttcttggtgttacccagcctggggaggagccttcagtcggccctggatgtcagcccaaagcatgtgctgtcagagaggtctgtgctgcaggtggcctgccggctgctggatgccctggagttcctccatgagaatgagtatgttcatggaaatgtgacagctgaaaatatctttgtggatccagaggaccagagtcaggtgactttggcaggctatggcttcgccttccgctattgcccaagtggcaaacacgtggcctacgtggaaggcagcaggagccctcacgagggggaccttgagttcattagcatggacctgcacaagggatgcgggccctcccgccgcagcgacctccagagcctgggctactgcatgctgaagtggctctacgggtttctgccatggacaaattgccttcccaacactgaggacatcatgaagcaaaaacagaagtttgttgataagccggggcccttcgtgggaccctgcggtcactggatcaggccctcagagaccctgcagaagtacctgaaggtggtgatggccctcacgtatgaggagaagccgccctacgccatgctgaggaacaacctagaagctttgctgcaggatctgcgtgtgtctccatatgaccccattggcctcccgatggtgccctaggtggaatccagaactttccatttgcagtgtgcaacagaaaaaaaaaaatgaagtaatgtgactcaaggcctgctgtttaatcacagataagcttctagaacaagccctggaatgtgcattcctgccactggtttcaggatactcatcagtcctgattagcctcccggagggccccagtttccctcccgtgaatgtgaagttccccatcttggtggcctgcccttcagccagtgtcctagcaaagctggatggggttgggccggcccacaggggggacccctcctacccttgacacctctgtgctttggtaataaattgttttaccagagaaaaaaaaaaaaaaaaaaaaaaaaaaaaa

SEQ ID NO: 2420 - DNA, 2987 bp, Homo sapiens
agcagtgttctcttcgtccccctcccccaaactgaggattgggcaataccacagaacctcaggaaaggggggaagagcgagcttcggccccactaatgggggagtgggcggaggctggatttcccacctcggctgcacctgggcactggaggctgaagaggaaagtgagaatctgaagttttgagacctctgactggccaggaatagctcctggggcggggggcaaggatgggaccataggcggaaagagtctcgcggtcccccctgcttctggcgcgggtccctgcgcccggttgtggagcgtctcgcgcggggagggggcggggggaacggcagctcgcggtgttgttcactcgcgcgtcgagcacacggtgggtccggcggcgggttggcgccccaggcggcgttccctgtggcctggcgcctgggccgctgccctgagcgggttccgccccagagcccgaccctcctgggggctctaggcggagtcccgcgagccgagggggaccggcgaccgctgccgaagcatgaagaaggggtaaggcgtgagcccccaagatttcacggtgaactggcacaaaggttaatctcaagatgccgctagtgaaaagaaacatcgatcctaggcacttgtgccacacagcactgcctagaggcattaagaatgaactggaatgtgtaaccaatatttccttggcaaatataattagacaactaagtagcctaagtaaatatgctgaagatatatttggagaattattcaatgaagcacatagtttttccttcagagtcaactcattgcaagaacgtgtggaccgtttatctgttagtgttacacagcttgatccaaaggaagaagaattgtctttgcaagatataacaatgaggaaagctttccgaagttctacaattcaagaccagcagcttttcgatcgcaagactttgcctattccattacaggagacgtacgatgtttgtgaacagcctccacctctcaatatactcactccttatagagatgatggtaaagaaggtctgaagttttataccaatccttcgtatttctttgatctatggaaagaaaaaatgttgcaagatacagaggataagaggaaggaaaagaggaagcagaagcagaaaaatctagatcgtcctcatgaaccagaaaaagtgccaagagcacctcatgacaggcggcgagaatggcagaagctggcccaaggtccagagctggctgaagatgatgctaatctcttacataagcatattgaagttgctaatggcccagcctctcattttgaaacaagacctcagacatacgtggatcatatggatggatcttactcactttctgccttgccatttagtcagatgagtgagcttctgactagagctgaggaaagggtattagtcagaccacatgaaccacctccacctccaccaatgcatggagcaggagatgcaaaaccgatacccacctgtatcagttctgctacaggtttgatagaaaatcgccctcagtcaccagctacaggcagaacacctgtgtttgtgagccccactcccccacctcctccaccacctcttccatctgccttgtcaacttcctcattaagagcttcaatgacttcaactcctccccctccagtacctcccccacctccacctccagccactgctttgcaagctccagcagtaccaccacctccagctcctcttcagattgcccctggagttcttcacccagctcctcctccaattgcacctcctctagtacagccctctccaccagtagctagagctgccccagtatgtgagactgtaccagttcatccactcccacaaggtgaagttcaggggctgcctccacccccaccaccgcctcctctgcctccacctggcattcgaccatcatcacctgtcacagttacagctcttgctcatcctccctctgggctacatccaactccatctactgccccaggtccccatgttccattaatgcctccatctcctccatcacaagttatacctgcttctgagccaaagcgccatccatcaaccctacctgtaatcagtgatgccaggagtgtgctactggaagcaatacgaaaaggtattcagctacgcaaagtagaagagcagcgtgaacaggaagctaagcatgaacgcattgaaaacgatgttgccaccatcctgtctcgccgtattgctgttgaatatagtgattcggaagatgattcagaatttgatgaagtagattggttggagtaagaaaaatgcattgataaatattacaaaactgaatgcaaatgtcctttgtggtgcttgttccttgaaaatgtttggtcattctagtgttttgctttcttttccttataataaatgacccttttcctccataacttttgatttctaaggaaaatattagcatacatttcaaactaaatgttttacagtggcttatcttttttttccccctgaaaagactaatttggtcaaataaaccactaagtattaagcatggacagctgttgttagagtagcagattcagttttttgatatatcttaattgtgtactttgtgaattttaatttaaagaaagcaactgaaattgaaatcttgagggcagctgtgtctactaatgagccttattccatttcctgatgttttaaaagaagaaacactgccttgattatacgaatacactcagaaagtacatttagcttgtagtgttgaattctcttaaaggaatgcttgaattttttcattattgttttattgtttttatatacttgccttatttgaatgtttagcagtatccccttcccacttatatattgtgtgatatgattttgcttgcctataggagttaaaaacttttccatgtgaaatactctgacttaaacatacatgtaacttacataactgttaagaataacagtctgatttaataaatggttcattttaaaagttaaaaaaaaaa

SEQ ID NO: 2421 - DNA, 1183 bp, Homo sapiens
gttctgcccggatggaagctccggccgcggagtgatggtggcctcagcgaagatgggccgggcagggaccatggcggtggcagcagaggtggcaggggcggggcggctggcggtagaggaggctgtggtcctcagggggctgtaggtggaggtatggctcgggccagcagcgggaacggcagcgaggaggcctggggggcacttcgggcgccgcaacagcagcttcgagagctgtgcccaggagtgaacaaccagccctacctctgtgagagtggtcactgctgcggggagactggctgctgcacctactactatgagctctggtggttctggctgctctggactgtcctcatcctctttagctgctgttgcgccttccgccaccgacgagctaaactcaggctgcaacaacagcagcggcagcgtgaaatcaacttgttggcctatcatggggcatgccatggggctggtcctttccctaccggttcactgcttgaccttcgcttcctcagcaccttcaagcccccagcctacgaggatgtggttcaccgcccaggcacaccaccccccccttatactgtggccccaggccgccccttgactgcttccagtgaacaaacctgctgttcctcctcatccagctgccctgcccactttgaaggaacaaatgtggaaggtgtttcctcccaccagagtgccccccctcatcaggagggtgagcccggggcaggggtgacccctgcctccacacccccctcctgccgctatcgccgtttaactggcgactccggtattgagctctgcccttgtcctgcctccggtgagggtgagccagtcaaggaggtgagggttagtgccaccctgccagatctggaggactactccccgtgtgcactacccccagagtctgtaccgcagatctttcccatggggctgtcttccagtgaaggggacatcccataagtagttttgagagggtggatgggttacttgcccaccagaaacagccctagtcccaactccttgcgttcctttggcccctccctgcctacctagaatctgcctgaaagggctggagaggggcagtattgggggactgtgctagctttacccccgcaggacatacacaggagcctttgatctcattaaagagatgtgaaccagcaaaaaaaaaaaaaaaaaa

SEQ ID NO: 2422 - DNA, 1720 bp, Homo sapiens
agaagggcaacctcgtgctttctgcagaggagaccggagggcagaaggcagagtccaggcttagactgcagttcctcgcttacctgtgcagtctaattttgagctgcctctttgtagtcttaaaaggcaggagcttcgtgttgtgggtctgctaacccgtacgtttccgtgggcaagtcgtgtgtactcctcgccatggctcagctccaaacacgcttctacactgataacaagaaatatgccgtagatgatgttcccttctcaatccctgctgcctctgaaattgccgaccttagtaacatcatcaataaactactaaaggacaaaaatgagttccacaaacatgtggagtttgatttccttattaagggccagtttctgcgaatgcccttggacaaacacatggaagtggagaacatctcatcagaagaagttgtggaaatagaatacgtggagaagtgtaccgcaccccagccagagcaatgcatgttccatgatgactggatcagttcaattaaaggggcagaggaatggatcttgactggttcttatgataagacttctcggatctggtccttggaaggaaagtcaataatgacaattgtgggacatacggatgttgtaaaagatgtggcctgggtgaaaaaagatagtttgtcctgcttattattgagtgcttctatggatcagactattctcttatgggagtggaatgtagagagaaacaaagtgaaagccctacactgctgtagaggtcatgctggaagtgtagattctatagctgttgatggctcaggaactaaattttgcagtggctcctgggataagatgctaaagatctggtctacagtccctacagatgaagaagatgaaatggaggagtccacaaatcgaccaagaaagaaacagaagacagaacagttgggactaacaaggactcccatagtgaccctctctggccacatggaggcagtttcctcagttctgtggtcagatgctgaagaaatctgcagtgcatcttgggaccatacaattagagtgtgggatgttgggtctggcagtcttaagtcaactttgacaggaaataaagtgtttaattgtatttcctattctccactttgtaaacgtttagcatctggaagcacagataggcatatcagactgtgggatccccgaactaaagatggttctttggtgtcgctgtccctaacgtcacatactggttgggtgacatcagtaaaatggtctcctacccatgaacagcagctgatttcaggatctttagataacattgttaagctgtgggatacaagaagttgtaaggctcctctctatgatctggctgctcatgaagacaaagttctgagtgtagactggacagacacagggctacttctgagtggaggagcagacaataaattgtattcctacagatattcacctaccacttcccatgttggggcatgaaagtgaacaataatttgactatagagattatttctgtaaatgaaattggtagagaaccatgaaattacatagatgcagatgcagaaagcagccttttgaagtttatataatgttttcacccttcataacagctaacgtatcactttttcttattttgtatttataataagataggttgtgtttatgaaatacaaactgtggcatacattctctatacaaacttgaaattaaactgagttttacatttctcttt

SEQ ID NO: 2423 - DNA, 5814 bp, Homo sapiens
gcgtgaggccgagggaggggcggcggcgcgagcggcggcggcggcggttccagcatgaagaggagagctggcctggggggcagcatgaggtcagtggtgggcttcttgtcccagcggggcttgcatggggaccccctgctcactcaggactttcagaggagacgcctgcggggctgcagaaacctctacaagaaggacctcctcggccacttcggctgtgtcaatgccattgaattctccaacaatggaggccagtggctggtctcaggaggagatgaccgccgggttctgctatggcacatggaacaagccatccactccagggtcaagcccatacagctgaaaggagagcaccattccaacattttttgcctggctttcaacagtgggaacactaaagtgttctctggaggcaatgatgagcaagttatcctccatgatgttgaaagcagtgagacattggacgtgtttgctcatgaagatgcagtatatggcttgtctgtgagcccagtgaatgacaacatttttgccagttcctcagatgatggccgggttctcatttgggacattcgggaatccccccatggagagcccttctgcctggcaaactatccatcagcctttcatagtgtcatgtttaaccctgtggagcccaggttgttggccacagccaattcaaaggaaggagtgggactctgggacattcgaaaacctcagagttctctcctgcgctatggtggaaacctgtccctccaaagtgccatgagtgtacgattcaacagcaacgggacccagctcctggccctgaggcgacgcctgccccctgtgctctatgacatccattcccgcctgcctgtgtttcagtttgacaatcagggttacttcaactcatgcaccatgaaaagctgctgttttgcaggagatcgtgaccagtatatcctttcgggctctgatgacttcaacctgtacatgtggagaattcctgcagatccagaagcaggtggcattggtagggtggtcaacggagccttcatggtgctgaaagggcatcgatctattgttaaccaagtccgatttaatccccacacctacatgatctgctcttctggtgtagaaaagattatcaagatctggagcccatacaagcagccaggatgtactggagacctcgacggtcggattgaggacgattcccgctgcctctatacccatgaagagtacatcagccttgtgctgaacagtgggagtggcctgtcgcatgactacgccaaccagtcggtccaggaagacccccggatgatggccttctttgactcactggtacgccgagagatcgagggctggagctctgactcagacagtgacctcagtgagagtactatcctccaactgcacgctggggtcagcgagcgctcaggctacactgactcagagtcttcggcctcattgcctcgctccccgcctcccacagtagatgagtctgccgacaacgccttccacctggggcccctgcgggtcaccaccacaaacacagtagcctcaactccaccaacacccacgtgtgaggatgcagcctctcgccagcagcgtctgtctgctctgcggcgctaccaagacaaacgcctcctggccctttccaatgagtccgattctgaggagaatgtctgtgaggtggaactagacacagatctctttccccggccacggtcacccagccccgaagatgaatccagcagttccagcagctctagcagctctgaggatgaggaggagctgaatgaacgccgagcctctacctggcagcggaatgccatgcggcgccgacagaagacaacccgagaagacaagcccagtgccccaatcaagcccaccaacacttacattggagaagacaactatgattacccccagatcaaagtggatgacctctcctcctccccaacctcgtcccctgagcggagcacttccacgctagagattcaaccaagccgggcatcaccaacttctgacatagaatcagttgagcgaaaaatttataaagcttacaagtggctccgctactcttatatctcctactcaaataacaaagatggagagacctccttggtgactggggaggcagatgaagggagagcaggaaccagccacaaagacaacccagccccttcttccagtaaggaagcctgtctaaacatagcaatggcccagaggaaccaggacctgccacctgaaggctgcagcaaggacacttttaaagaagagactcctagaactcccagcaatggcccaggccatgagcacagcagccatgcttgggcagaggtgccagagggtacctctcaggacactggcaatagcggctctgtagagcacccttttgaaaccaagaagctcaatggaaaggccctgagcagtcgggctgaggagccgccttctcctcctgtccccaaggcatctggctccactctcaacagcgggtctggcaactgtcccaggacccagtctgatgacagtgaggagaggagcctcgaaaccatctgtgccaaccacaacaatggacgcttacaccctcgtccccctcaccctcacaataacgggcagaacttgggggagctggaggtggtggcctactcttccccaggacactcagacactgaccgtgataactcgtccctgacagggacactcctacacaaagattgttgcgggtctgaaatggcctgtgagacccccaatgctggaacaagagaggaccccactgacaccccagccacagatagtagcagggctgttcatggccacagtggcctcaaaaggcaacgaattgaattggaagatacagattcagagaattcctcctcagagaagaaattaaaaacatgataaatacaaagggaaaacaaaaagctacaaaagtagccttacaaaaaaaaaaaattgtttagtgaatacagaggaaaggaaaaacaagtattaaaggcacatgaaaccagggcctgaaattttgtgtctgatgctgctcccttctatccaacattcaacaacgggtctgaatgtctagctggccattggcttgtgctgtgttaagaaaggggaaaaaaaaataacccaagtgactcctttctagtgagacgtgagcgtagtgtgccgcgcaaggctctgtggaagtaaatctttgttgagacgttcgacttgttcttgtgtacgcacaatggcacgtgtgcgcttattgtctcataagaccttccttttagttctccatcagaaaggacctatgaatttgtactttttgccatctcaccctgtttacatgccataggtgttctggtctggatgatgggtgcctgttaaatcaggttgtgctgccagtgagttgtagatttatgctggaagaatggagaatggaaacaggccttcagcccattggctgcgctggagaggaaagcatggttcctttcttaaagaaatcttccatgttttctctaagtaacacttctttattgagcatttaatgtggacatactataaaaaagaatttttaatgctaatgagaggtttagcacttaagatcagattcaagagaatatagattcctgataaatttcactgtttgcaaattgagcagtgctgcaacatgtactgtatgaaggccataaaatagagctagtcatggataacagactttaaccagttaggtgctagatcctaagaggcactcacaaggccagcaggtgcttccttggctcccatgatcgatcgaggcatagtgaaagaagggcaaagacagctttccagagctttgtgctcaggctactaaagtagttgttataggtgtgttaacgaagaagcttagtgaggagcagaatgtggtactatattcatttaactcaacccagaaccattggtcagaattggtgggactggcatcttccctcagacttgcagttgatagaggctgtggtgttctcactagactttgcagagcagtaggcatctcaaggtaacagattcttattgagtaggtctattaggagtcagaaggtgttggggaggagtctctggcttatgactcctggttcccattagtcttaagtcttctggttcccataaaagactcagttttattgaggtagatacaggtttagaagagaaaagagcaacagattttcagcgttgcagtcactcggttatctatgaagggttgtgcaaaacaggaaggtctgggaatgaccagatatcttgttggcataaatgttatgaaaaggcagaatactggcaagaaatgaggaagagagagaaaaacaatataactttcttgagtgcaaaggtgctagacaactaggagcccagctgggattggtgtagggagggccgaacgctgactagtgtggcctcactgccccaggcttcctttcagaggaaggcctgtcctgctggaactggagccaaggggaggctgcctatgaaggcagaagatgtggatgaattcaggcactgggggtgggggggttatttataaacacaaggtggttggtttaagccaaaaggagataccatcctgataagctctgtgaaagagaagatgtgcctggtgtgtgtaatgcggctggggtatgaaaacactgagaaggagatgaaggagtgtgtgtagcatgggggtgtgtacaacttaacacctggacttttactgggggagtgggaaagtgattctgtaaccaacattagaattactttggatttgtaatcagattggttctatgatttgtctttgactattcacagataattgtaaatgctggttttataagcccaagtcattttacatttgcttttccaaaatgtattaaattggaatttttttaatcctttatatacaaaaaaatacgatcactcagtgtgtgtttctcttccccttcttagtcagcacacccagtcctttattttattctattctatttattttattttaataagtacttagcctcttctgacttctcaaaggacaatcggatacatatcttcctgaaaagaagtagttaaagttcccttgggaactagctacttggtagttacaattcccaaatgcagaacttggtcttttcatgttaaaagccttaatctcatttgggtactcaaaagagaaatcagagtttattctggttaacttgagaagccaagaaagatcatttttagcaagtatgccttccatccttggcagaggcttcccagcatcctaggctcagcttaccgggtgataggccccataagacacacacatgagcagggtgagaaatgcttgctttatagctgctccaccctcatctccagagattttgtgtctatggttgtgggtctggaaacctggcaggaaccacttctagagtacctttgcctaaactcttttagaattgaggccccaactttgatggcacatttaatacccaatttcttccataatagatatttttaatagcaggacagatggcactgattagatcaagaactatttggaagtgcctcttatgtttttttcctgcattctgtacataaagttttaagtggcaggtccagatatgtaaaatcatttctctctattttccagctggttttgttaatgattctctaggacagcaggtaaatgagttaagttgttggcttggggcaagtgaagtttgtgactatgcttgatttaataagctgagagtctcttgtttgtctgtcaaggtgccttcctctgctgaagccttacctccttctcacccagtaacggttaactcttctcttgtgtatatgcaaataaacctattattcact

SEQ ID NO: 2424 - DNA, 7932 bp, Homo sapiens
tggcagctgaacaggggcactgaggtgtcggccggcggggcagtggcccggagcggggggcgggggcgttgatcatgtttccctttgggccccatagccctggaggggacggatcggccggagccggggctgaggagccgacgccccacgaggggcaggcagcagccaccgggccgccctcgccactacatcccggggctgatgcgacccatccccctccacccgcccgaagccctcgccgccccggcgccccatcgctgtccccggccccgcgctccggagagctagggctgcctggagctccggagtcctcaactgcctccgccccgggagagccgtcacctccctcccctccgtgccggcggcccgggccagactgcagggccaagagccggggccgacacggcctcggcgcgggcctgggcggccctggcgctaggctgttcgggtggctgaaagagcgcagcctgggccgcgggctgttcgtggacccggcgcgggacaattttcgcaccatgactagcctctacggttccatccaccccgcggactcggtgtacctcagcacccgcacccacggcgccgtcttcaacctcgagtactcgcccgacgggtcagtgctgacagttgcttgtgaacaaactgaagttctgctttttgaccctatatcttcaaagcacataaaaacactttctgaagctcatgaagactgtgtaaataatatcagatttcttgataaccggctgtttgctacctgctctgatgacactacaatagcactatgggatctgagaaaattgaacaccaaagtatgcactttacatggtcacactagctgggtgaagaacatcgaatatgatactaatacaagactcttagtaacatcaggatttgatggaaatgtcattatttgggacactaacaggtatacagaagatgggtgtccacataagaaattctttcacacacgttttctcatgcgaatgaggttaacaccagattgttccaaaatgttgatttcaacgtcctctggatatctcttaattttgcatgaccttgacttaactaagtctttagaagtaggcagctatcccattttaagagcaagaagaactacttcaagttcagatttgaccacttcatcaagttcatctggtcctagagtttctggctcaccttgtcatcatagtgattctaattcttctgagaaacacatgtcacgagcctctcaaagagaaggagtttcaccacgaaatagtcttgaagtcgtaacccctgaagttcttggtgagagtgaccacggaaactgcatcacgtccttacagctgcacccaaaaggctgggccactcttcttcggtgctcaagcaacagtgatgatgaggagtgtacttgtgtctatgaattccaagaaggagctccagtgcgacctgtctcacctcgctgttctctacgactgactcattacattgaagaagccaatgtaggcaggggttacatcaaagaactttgcttcagccccgatggacgaatgatttcttccccacatggctatgggattcgcttgttgggatttgacaaacagtgcagtgaacttgttgactgcttgcccaaagaagccagtcccctgcgggtgatccgttctctgtactctcataatgatgtggtactgacaacaaagttctctccaacacattgtcagattgcctcagggtgccttagtggacgggtttctttgtatcagccaaagttttaggcacaacttacatcaaataaggaactcttctggtgtttgacttaggaattgcttcaatttagatgaagtattttctttttagaagatcttataagtttgggtcaagatcctggttcttatgggtccatgaacacacttgtgaccttagtacttggtcatccagcatcatacaggcatctccaagttagactctatgcagcatcatcttttgcagcattcctctgctcctgctgatctgtgccactgaactccagttcttctggtcattttgcatggtagctcttgtcacgttccttccttcctcactctctatttctctttccctctccctgtccctctctttctttgtgtttgttgattttggtgtcaattttgtggacatttggcaggagttttgactggggtaggagaaacccatgacattagaattgaataaaacctagaagttggatattggcatattggttgttgaaaaataaatttcatcctcacttatgagtatacttggccttttaaagttactgttatgtttatctatattgagcacagataatggcattattcttataattgttaagatagtcttgcaacaaaatgtcttttaagtttcctgttaaaattataaaaagattttcatggtgagagggattttattgtgaaattctagaaaaaaatattaccacctctctttgtaatttactttacttgtatgaatttaacatctctagcatgtatccttacttgatattttgttcctatcaacagcattagaaaggaaaggagacagaatgagctttggttatttctattgcacagaaaaggatttttaaaattagattagtataatatctggccatagagtgataagaacaatatgacttagattttctgtatttcatctgccagattatttgaatcacacaggatgatgtgttaacagtattagggtggaagaggaatcaagagtaaagaggtaggggtttactcatttttcttccctgagccaggtgtgacaagccaactctgtcaccattcgtgaggggagagttgcagtcctcttcaagctgttatcataagtacagtagtcagctacttggatatcaagactaagtgctgatatgaagacttgcctttgtgttttgttatgaaacacgcaagcataaagcaggactcaagcacaaggctgactgttctactttgaataacagcttccttgcagtctcctccacatgggtggtactgtgtttagaagggattaccaaaggctggagcgatttaagctatgcactagccttgccctcttaggttgcattctctttaggccactggttctcaaacattagggtgcactgtaaccattacagagcttgtgaaaagtgcagaaacctgagcctcaccttatgagattctgattcagccagggggaggacaggaatctgtatttttcatagcaacctcaagtaatctttattctgagggtctcgggattgcaggttgaaaaacacaaccttaatcagcagtaaattcttctctactcggccaggcgcagtggctcatgcctgtaatcccagcactttgggaggccgaggtgggtggatcacaaggtcaggagttcgagaccagcctgaccaacatggtgaaacgccatctctactaaaaatacaaaaattagccgggcgtggtggtgctcacctgtaatcccagctacccaggaggctgaggcaagagaatcacttgaacccgggaggcagagggtgcagtaagccgagattgcaccactgcactccagcctaggcgacagagcgagactctgtctcaaaaaaaaaaaaaaaaaaaaaaaattcttctctacccatttgggcttaagacaattcccagaaagtgttttcattatttaaaaaataataatagtaaatgaaagcaattttagaggtggaaaataccttagaatggaatcatttgcattatttgacaaatgagagaagtgacatgacttgcctaaggtcatcctgcaaagttagtggcagagttaggacttgaattccagtcttctaattccttggtcagggcaatttctactgtgttatgctgtctgttagaaataatgacttatggacactttgtctttaagttgtattattgtaaatacccttaaactggccaatagattttagaaaggcaggcatgggagtagatgctgagaattctagccataagaagaaaagtattttaaatcttacagaaatgtttaaacaacccaaaatacatgaataaaaatgacatttctttgtaggacctgccaactaactattcacacacatttatagaggttataaggatcttggctctagaacaaatttttgaaattagatcattttaccatggatgttaacaaaattggaaattttttgtcactgagaaaattatcacaaagcacagtaaatacatatacttaccatacattttgtaaaaaacacattttttaaagaaaatagggatgggtatggtggctcacgtctgtaatcccagcactttgggaggccaaggtgggaggttcacttgagcccaggagttccagaccagtctgggcaacatggcgaaaccccatctctaccaaaaatacaaaaattagatgggcatgttggtacacgcctgtagtcctagctactcaggaggctgaggtgggaggatggtttgagcctgggaggcagaggctgcagtgagccaagattgcactattgcactccaccctgggcaatagagccagatcctgtctcaaaaaataaaaatagactgggcatggtggctcatgcctgtaatcccagcactttgggaggctgaggtgggtggatcacttgaggtcaggagtttgagaacagcctagccaacatggtgaaaccctgtctctaccaaaaatacaaaaatcatagccaagcgtggtggcaggtgcctgtaatcccagctactcaggaggctgaggcaggagactcgcatgaacctgggaggcagaggttgcagtgagccgagatcgcaccactgtactctagcctgaccagcagagcgagactctgcctcaaaaaaaaaaaaaaaaataaaataaaataaaattagttttggaggtgaaaacacccaaactgttattatttaaaaatacctaccaagtactgtggtcatattgacattcaaaagaagtttcataaatcgtatcaactctggaaagagttcatgtcagatgctagaccagcaagttacccaactcaaaattcagccaatgattctttactatagagtacctatcatgtgtcaaataatatacagacttcactactaaccctcacaaaaacttgcagggtaggtggaatgagccccaatttaatttggaggtaatagtgggtcagaaagattaaatgacttgccttaagtcatagagttagcagtgagtggcagcactgggattcaaacccaggtttgtgtcttgtccaaagcctgtgcttactgctttaccattgtgctctttagtttgtaaagtatggtaagctggcctgttatttgtttagtatcttctggattttttttttttaattatagagctagcttaccgtgtgtatcatgtaaaaaaaattcataagattaacaatttccatgagaatatcataaactcagggcacacattctggccattcctgactaaaaaacttcaagcagaataagcagctataaaatagaaaagaaaaattaaggataaacggcattgtgaaaaaaaaccgagccacacagatgagaattaaaaattaacagccagcaaactcaaaagaacctttgtcctccttgagatatggtgatgatcaaaaagttagcaaggaatattaatcaaggaattaaagggcattaggaatgctatagtattggaagaaattacatcttaacatttcaaagccccatttcacttaagagtaaaatctaatctgatgttttttactctgaattttattcagtaatttttattcataattcatgataattggtaatgtagtataattgttagtaaatgcagtacaaattgttctactgttttaaaaagttttccgcagaacagtgcatttatggcaatgctatgtttaatgagttagggacatcaaatatatagtagttccttattttcagttgtgaaaatgaaatggctaaagcagaagagacgtctattttagtcttttaaaaatgtgtgtgggtggtcttttttcctcagaagcccaaagcacatgtatattttgttatttctccttgctatattcctgagactatactaaaaactttaagaaaaggaacaagaaaaaggtaaattcatgtgttccccactgctgtgtctagaaccaagatcacattatatcattgttaaaattgtgttatctagaaagtgcaatatagggaaaacactctaagaatcttttaaaagcctagtgtttcccttatttgtcagaatatgtggtagtggcatccataagtatcttttaacttgcatttagcaggacaaatagtgtgatacttatactgatgacaatcatccccatttaatgaccagcagtcactgagcgctgtgaaaattcactcagtgataccccgtgttggtcttgaaggaaaccgtacatatgaatttttggatagctaatgtatatctctcaagtgccaacatttaaaacttgtaattatttttgatgtgagtatttcaggtatgttagtataccttcctgccttcttcttaaacatcatgctcagtataattcacattttcatgatgaaaagttaaagttatattcataatgtattattataagtatccagctctgatgtatgtaaaacacttcataaaatgtaaagggctataacaaatatgttataaagtgattctctcagccctgaggtatacagaatcatttgcctcagactgctgttggattttaaaatttttaaaatatctgctaagtaatttgctatgtcttctcccacactatcaatatgcctgcttctaacaggctccccactttcttctaatgtgctgttatgagctttggacatgagataaccgtgcctgttcagagtgtctacagtaagagctggacaaactctggggggacacagtctttgagacagctcttttggttgctttccacttttctgaaaggttcacagtaaccttctagataatagaaactcccagttaaagcctaggctagcaattttttttagttgcaactaagtaagatatactacaaactaaggatgctgctagactaaggaataaacagcaaggtaccaaagtacagcaaagcaacaacaaaggctctgtatttgcagaggggtctatcatgcttttaagaaaaaagaagagtacaggaaaaaaattcagatagacataagagtattttggatgccattaaactttgtcaataaccattaaaacataggcttaaattatcacgtattgttacaaagacacagttttgtctcattataaaataagattatatgaaatttatattctagaaatgattccaaatcatgtcctaagaatttctcccattcaaatgataatggaaattactgtcaaaaggaaaatctcaaagttaccattacgctgctctcttgtaaatgaactagggataaagatatgggttttatcaaaagccctaaggaatatatctcacattcacctcctatatgtatgtgtatatataaatgccactataaatgaaaatgtcacccagagataataaaataatttttaaagtttaaatctggtccaaagtctttaaaataggtagattttcagctttcttaagtttctccctcatttagatttcatggtttttacataaagggtgaatatttgaattttcttttaaatttcactgcatcttcaattgcccaactgtgtttcctgataaattttagattcacatttttaggaaatttggagtattccagacaatatactagatacccagaaacttttctcagtaggttctgaggtgttttaagttcttatgctagactgtaagctccttgagggcagagactgttttatttattcttgtatcctcagtgcctggtacaggacttgacacagagtagttgttcaataaatatttgttgaatgaatcaaaaaaaaaaaaaaaaaaaa

SEQ ID NO: 2425 - DNA, 3148 bp, Homo sapiens
cctggaggagaagtgatttcatttggaccttctgggatagagtggtggacatgacaacagagtcaactgcatacagtggcatcaagacagtggctgtttatatagttgttcagatgataaacatattgtggaatggaacgtacagacatgcaaagtaaagtgcaaatggaaaggcgacaatagcagtgtcagttccctatgtatcagcccagatggaaagatgttgctttcagctggtcgaacaatcaaactatgggttttggagaccaaagaagtctacaggcatttcacaggacatgcaacgccagtttcgtcactgatgttcactaccatcagacctcctaatgagagccagccctttgatggaattacaggtctttatttcttatctggagcagtacatgaccggttacttaatgtctggcaggtccgatcagaaaacaaagaaaagagtgcagtgatgtcatttacagttaccgatgaacctgtctatattgacttaactttgtcagaaaacaaagaagagcctgtcaagttggctgttgtttgcagagatggtcaagtccatctttttgaacacatattaaatgggtactgcaaaaagcctttgacttcaaactgcacaattcagatagcaacacctgggaaaggcaagaagtcaacaccaaaacccatccctattctagctgctggtttttgctcagacaaaatgtcattgttgcttgtatatggcagttggtttcagcctactattgagcgagtggctttaaactccagagaacctcatatgtgtttagtaagagatatttcaaactgctgggcccccaaagtagaaacagctataacaaaggtgaggacaccagtgatgaattctgaagcaaaagttctggtgcctgggattcctggtcatcatgcagctatcaagcccgctcctccacaaaccgagcaagtagagagcaagaggaagtcagggggaaatgaggttagcattgaagaacgtctgggagcaatggatatagacacacacaaaaaaggaaaggaagacctccagacgaatagctttccagttcttcttacccagggcttagaaagtaacgattttgaaatgctaaataaagtacttcaaactaggaatgtaaaccttataaagaagactgtattaaggatgcccctgcatactattattccgttgttacaagagcttacaaagaggttacaaggacatcctaatagtgctgtgctaatggttcagtggctaaaatgtgtgttaacagttcatgcatcatacctgtccacgttgcctgacctggtaccccagctggggacactctaccagttaatggaaagcagagtcaaaacttttcagaaactttcacaccttcatggaaagcttattcttctaattacacaagtaacagcatcagagaagacaaagggagcaacttcccctggacagaaggcaaagttggtgtatgaagaagagtcttctgaagaggagtctgatgatgaaatagcagataaggattctgaagataattgggatgaagatgaggaggagagtgaaagtgaaaaagatgaggacgttgaagaggaagatgaggatgccgaaggaaaagatgaagaaaatggcgaggacagagatacagcaagtgaaaaagaattaaatggagattctgatttagatcctgaaaatgaaagtgaagaagaatgaagacagcaaagcaagccggtcaaactatataaactctggctcaccttgcccagtggtgagggctgcctctgtgccaggatgccaaggaccgctgcacatttccaaattcacagcagtggatcccatgccactttgctgtcctgagcaccccagacttgactgtgtaaataagagtgtttcattcaaatgttaataaactttacacagtatatagacacattttctgcaatgtactgacatcagtgtccaatatatggtatatttttataatataatatcctagtatgattggttatatcaagaattgacaagtgcagataaagacctttcccataggagttcaagaactggactgttgtgaagaagtcagctcttatctcaggttggtatctttcatcaaatccagatgcaaagcagcactagtgaaaatttttttaatttagtacatttaatttggtacattttcataaaatatgaagggataactacaaactggagtaaaaatgatggtaattaaaaaaaatcctcagtatccctagcttgtctattaactgtgataatctgacttgagtcagattgaatatttggagtgcttccccagaataaccacttatttttgaagctatcatgtgaagtatttttttaaaacaaaacaaaaattatggtcattaaaaaactagagaattagccatattaaggatttttcttgactgcaaattacttctaaagaatcatcagtgtatagattagaagtgctcattacctgcaacttttaaaaaaaattcagttatagctgcttttgaagaggtttccatttttatttaaattactaatggatcaaagaacaattgtttattttttctctttggttttagatattaatgataaccttgttggaattttttttccaaagaaaatatttttataattaaataatttaatgtttttcttccttttcattacctactcttggcagtgttagggtatctgtttacctttaaaatgataagtctcactcaagattttttatgtatgtataaatattttggtgtgctacaaaagcctttgcaaattatcagtagtagtttttttttttttttttttttttttaaagaatgagccgatattggcttagtgctcactaggggacatgcacatggaagctcacctctaagaaagggctgggcagatggatttattttttcccacctgtgaatatgtaaaacaaaaccattatctttgagggagtttttaataccaatgacagaacagagatttgtgtgctcatcttaagagccagagccatataagcatcttgggaaagcaagtttgaaccagctgctggtgtaatgtacagttatatttgtctataaatggagctgtttatggcaatttaataccattctctttgtaaagtgaataaatattcatctttac

SEQ ID NO: 2426 - DNA, 7183 bp, Homo sapiens
ggcggcaccggcaccttgcagtatcactggggagacggcggctgtatagcgcttgccgccccacggattatcccagcaggatctacgcaccccgcatcctccgtagttccgccctatccttgtcctccttggctggggcgcccaccggcggtctgataggctacatcgcggcatgagatgaagctgtgacaggtttgaaaacacaaacacaatggcaggaaacagccttgttctacccattgttctttggggtcgaaaagcgcccacacattgcatctcagccgtacttttaacagatgatggggccacgatcgtaacaggatgtcacgacggacaaatatgtctctgggatctttcagtagaactgcaaattaatcctcgagcactgttgtttggtcatacagcatcaatcacttgtttgtctaaagcttgtgcttccagtgacaaacagtatattgtgagtgcatctgaaagtggagagatgtgcctctgggatgtgagtgatggcagatgtattgaatttacaaaattagcttgcacacatactggcatacagttctaccagttctctgttgggaatcagcgagaaggaaggcttttatgccacggacattaccctgaaatccttgttgtggatgctaccagccttgaagtattatactccttagtatcaaagatatcaccagactggattagctccatgagtattattcgatcccaccgaacacaagaggacacagtggtagcactctcggtgactggcatcctgaaggtctggattgttacctcggaaataagtgacatgcaggatactgagccaatatttgaggaggaatccaaaccaatttattgtcagaattgccaaagcatctctttttgtgcatttacacaaaggtcacttttggttgtgtgttccaaatattggagggtgttcgatgccggagactattccttgttgtgttcaggtcctagtgaaaatggacagacatggaccgggggggactttgtctcatcagataaagtcatcatttggacagaaaatgggcaaagttatatttacaaactacctgccagttgccttccagctagtgattcattccgcagtgatgtggggaaggcagttgaaaatttaattcctcctgtacaacatatcctcttggatcgaaaagataaagagttgctaatttgtcctcctgttactcggttcttctatggatgcagagaatatttccataaactgttaattcagggtgattcttctggaaggttgaatatttggaacatatcagacacagctgataaacagggaagtgaagaagggctggcaatgacaacttctattagtttgcaagaggcatttgataaactgaatccttgtcctgctggaattatagatcagctgagtgtgattcccaatagtaatgaacctcttaaagtaactgcaagtgtgtacataccagcacatggacgacttgtttgtggtcgtgaagatggaagcatagttattgtacctgccacacagacggccatagtacagctgttgcaaggggaacacatgctcagaagaggttggccacctcacagaacactccgtggtcatcggaacaaagtcacatgtttgctatatcctcatcaggtctcagctcggtatgatcaaagatacctgatatctggaggtgtggatttttcagtcataatttgggacatattttctggagaaatgaaacatatcttctgtgttcatggtggtgagattactcaacttctagttccacctgaaaactgtagtgcaagagtacagcactgcatctgctctgtagccagtgaccactcagtaggacttctaagtttgcgagagaaaaaatgcataatgttggcatctcgtcacctttttcctattcaagtaatcaaatggaggccttctgatgattacctggtggtggggtgttcagatggttctgtgtacgtctggcaaatggatactggtgcattggatcgttgtgtgatggggataacagcagttgagattctaaacgcttgtgatgaagctgttcctgctgctgttgattcacttagtcatccagcagtcaacctaaaacaagctatgacgagacgtagtcttgctgctcttaaaaatatggcccatcataagctacaaacccttgcaactaacctcttggcttctgaggcatctgacaagggaaatttacctaaatattctcataactccctgatggttcaagcaataaagacaaacctaacagacccggacatacatgtgctattctttgatgtggaagcgttgattattcaactcctgactgaagaagcctctaggccgaatactgctcttatttccccagagaatttgcaaaaagcatctggcagttcagacaaagggggctcttttttaactggaaaacgagcagcagttctcttccaacaagtgaaagaaacgatcaaagagaacatcaaggaacacctccttgatgatgaagaggaggatgaggagataatgaggcagagaagggaagaaagtgatcctgaatatcggtccagcaaatcaaagccattgaccctattagaatataatttaactatggacactgcaaagctgtttatgtcctgccttcacgcctggggtttgaatgaagtactggatgaagtttgcctggatcgccttggaatgctgaaaccccactgcaccgtatcgtttggcctcttgtcaagaggaggccatatgtcactgatgctgccgggttataatcagcctgcttgtaaactgtcacatgggaaaacagaagtaggaaggaagctgccagcgtctgagggagtaggaaagggaacttacggagtgtcccgtgccgtcaccacacagcatctcctgtctatcatttctttggcaaatactttaatgagtatgaccaatgcaacttttattggtgatcatatgaagaagggtcctaccaggccacctagaccaagcaccccagacctttctaaggcaaggggttcccctccaacttccagtaatattgtgcaaggacagattaaacaaggttggagtcagttagctgctatgcactgtgttatgctgccagacctactgggattggataaatttaggcctccccttctggagatgctggcccgaagatggcaagatcgatgcttggaggtgagagaagccgcgcaggccctgcttctggcggaactgagaagaattgagcaggcaggcaggaaggaagccattgatgcctgggctccttacttacctcagtacatagaccacgtcatatcacctggagtcacatcagaagccgcgcagactatcaccacggctcctgatgcctcagggcctgaagcaaaagtccaggaggaagagcatgaccttgttgacgatgacatcaccactggttgcttatcaagtgtcccacaaatgaaaaaaatttctacatcttacgaggaaagacggaagcaagctaccgctattgttttacttggagtaataggagctgaatttggtgctgaaattgaacctcctaaactattgaccagacctcgaagctctagccaaattcctgagggattcgggttgactagtggtggatccaactactcgctggccagacatacttgcaaggcactgacgtttcttctgctacagcctccaagccccaaacttcctccacacagcactatccgaagaacagccattgatctgattggacgtgggttcactgtttgggagccttacatggatgtgtccgctgttctgatggggcttctcgaactttgtgccgatgccgagaaacaacttgccaacatcacaatggggttgcctctgagcccagcagctgactcggcccgctctgcgaggcatgccctctcgctcattgccaccgccagaccacccgccttcatcaccaccatagccaaagaggtacacagacatacggctcttgcagcaaatacccaatcacagcagaatatgcacacaacaactcttgcacgagctaaaggggaaattttgagagtcattgaaattcttattgaaaagatgcccacagatgttgtggatcttctcgtggaggttatggacatcattatgtactgccttgaaggatctttagttaaaaagaaaggtcttcaagaatgtttcccagccatctgcaggttctacatggtcagctattatgagcggaatcacagaatagcagttggagctcgccatggttcagtggccctgtacgacatccggactggaaaatgtcagacaatccatggacacaagggaccaatcactgcagtggcttttgctcctgatggaagatatcttgccacctactcaaacactgacagccacatttctttttggcagatgaacacgtcactgctgggaagcatcggcatgctgaactcggcacctcagctgcgctgcattaaaacctaccaggtgccccctgtgcagcccgcgtcccccggctcccacaatgccctcaagctggcccggctcatctggacttccaaccgcaacgtcatcctcatggcccatgacgggaaggagcaccgcttcatggtctaatgctgctgcctgccgccgtgactgcgttttagttctctaaattatccaagccgatgttgctctgtccttcctcacaccagattgttcccaggggcctgcccaccccagtgccatccagtggcacggccgggtcttgtcacttgtgcatgcttctcaggggcagaacccgctcgtgccatctgtcgattcagaggcacgcacacatgctctgcaggatgtggccatcctgtcaccaggtagtttttccctgccagagatggcaggggaaagccagtggttcctgggaacgctcttgttgcttggtgcaacagaagcacaaaaatcaataaacactgtgattgcactcccagcccagatcagcatttttagccatctcaaccgcacctctgaagtgctgcttgaatctggccgttctgacactgggtgttgaggtcatgtggcagtcctcacgattgaaattattgccctttgaattacctaaaatattgtttaccaaaaagattctgtgtttacatgttcttttcttctggtgattgctaggaaattactcaatccaatttcctagggtttagctaccaccttctttatcaacagctaaccaatttgagattcatgattaattatgtacacaaaaatattttccttgtagaaaatagttttccagacacttagccttctgaagtgctcatctcttgcttaaatgatagtctatttagtagtttaaaataaaaataatcactccctatgatctagttaatgtaattatccagtcactgtaactaatctcttgaagggacttttgtgataaagagccaagttcagaagcatagcgtgtaccgaaaatgaagactctcctatctactgctacagatcctgttgaagaaagagcttacccctttcccccggaaaacttgcaatcctgtagttcccatatgtgtggcatatgtcagttatgaaattattataattcagccttcaaactactactgatcaactaaaggaaagctaataaggtatttcttttaaacaagtattctggaaaagtaataactatggcacaaatgttcaggagtgtatataaaaatatgtgggctctcgatttatttgagcaaacattgcaatgagggtgttcattatgcttctaagtaagctttaactagaccactttcttcttatgtcagattgtgctggttctagctcataataatgaaaaaaatagaattatattttgtatgaattgtttctaacaaaccttgatctgtatatacttgtgaggggttgtttggttgcctaattgttgattggttggttagttgggcaaaatcatttattacatgcaaaaatagaaaattatttgttaaattcagagaaaatatgtgaagtttacaaaggaaccaaaatgataatgggagaatttagtcttaaaagtttaggttgtcagagtttatctgatatacaaaaaagtaggatcaaagtctaggaacaaacattggttatttcactgaaacagatttttaaagagcatattaagaaattaagaccattagatcatctctttcataatgatatgatgttatttccattgacggcaaatctatactgttccttggttttagagttgggtattctttcaaaagtgaatttaggcacatgcatgtacattgtatttataaagattatatatgtagtttccaaggaagaaacaaagacctatacagtttagactttatttgtttggtgaacgtgctgttgtgtttggcatagctagagaaatgtaaggtaaaaggctcactttgttttccagtgggtccagagtcttctctatacccaacatatgtttactttatgaacttaaatggaaattaatttattgtagactacatctctatttggaatgatgaggtaaatgtataccttagcattttctttaacaaaaatgttctgtgtgtcaggaaagaggtgtgagagtggtaggcagcctgccgcaaacacacggatggctccccccgccacgaaggttgagaacaaagccagggggcccagaggagcaatagccctgggccacaagcgtgggtaggcctttcacgtattccgtctgcacaggcaaccaaggccagtagaaagctatggctgcaaaaccctggggtggacgatgtttgatgattagacggtcatctctaactactaaactaatatctgcattcttgttaacataaatctctccttggctattttaatagccacagtcccaaacttcatcccagcttagatttctcagcactgaggtaaactctgcattgtcatcccagcgtacacctttaatgttttattgatttcactggcactgtatttggacctgtccttgtatatgtagagacatatgtggcttcattggtaatttacaagcaaaagatgacatgacgtgacacctgtatgaaaatgtgatgattgaactccctgtgtacagcgagtgaattaaaatgtctgcctctccagacatttcttaatgattccacttaatagactctatgtgtgctgaatgttcctgtgtacatatgtgtgttaaataaaacaattgtattgaagactgtttttctc

SEQ ID NO: 2427 - DNA, 7282 bp, Homo sapiens
ggcggcaccggcaccttgcagtatcactggggagacggcggctgtatagcgcttgccgccccacggattatcccagcaggatctacgcaccccgcatcctccgtagttccgccctatccttgtcctccttggctggggcgcccaccggcggtctgataggctacatcgcggcatgagatgaagctgtgacaggtttgaaaacacaaacacaatggcaggaaacagccttgttctacccattgttctttggggtcgaaaagcgcccacacattgcatctcagccgtacttttaacagatgatggggccacgatcgtaacaggatgtcacgacggacaaatatgtctctgggatctttcagtagaactgcaaattaatcctcgagcactgttgtttggtcatacagcatcaatcacttgtttgtctaaagcttgtgcttccagtgacaaacagtatattgtgagtgcatctgaaagtggagagatgtgcctctgggatgtgagtgatggcagatgtattgaatttacaaaattagcttgcacacatactggcatacagttctaccagttctctgttgggaatcagcgagaaggaaggcttttatgccacggacattaccctgaaatccttgttgtggatgctaccagccttgaagtattatactccttagtatcaaagatatcaccagactggattagctccatgagtattattcgatcccaccgaacacaagaggacacagtggtagcactctcggtgactggcatcctgaaggtctggattgttacctcggaaataagtgacatgcaggatactgagccaatatttgaggaggaatccaaaccaatttattgtcagaattgccaaagcatctctttttgtgcatttacacaaaggtcacttttggttgtgtgttccaaatattggagggtgttcgatgccggagactattccttgttgtgttcaggtcctagtgaaaatggacagacatggaccgggggggactttgtctcatcagataaagtcatcatttggacagaaaatgggcaaagttatatttacaaactacctgccagttgccttccagctagtgattcattccgcagtgatgtggggaaggcagttgaaaatttaattcctcctgtacaacatatcctcttggatcgaaaagataaagagttgctaatttgtcctcctgttactcggttcttctatggatgcagagaatatttccataaactgttaattcagggtgattcttctggaaggttgaatatttggaacatatcagacacagctgataaacagggaagtgaagaagggctggcaatgacaacttctattagtttgcaagaggcatttgataaactgaatccttgtcctgctggaattatagatcagctgagtgtgattcccaatagtaatgaacctcttaaagtaactgcaagtgtgtacataccagcacatggacgacttgtttgtggtcgtgaagatggaagcatagttattgtacctgccacacagacggccatagtacagctgttgcaaggggaacacatgctcagaagaggttggccacctcacagaacactccgtggtcatcggaacaaagtcacatgtttgctatatcctcatcaggtctcagctcggtatgatcaaagatacctgatatctggaggtgtggatttttcagtcataatttgggacatattttctggagaaatgaaacatatcttctgtgttcatggtggtgagattactcaacttctagttccacctgaaaactgtagtgcaagagtacagcactgcatctgctctgtagccagtgaccactcagtaggacttctaagtttgcgagagaaaaaatgcataatgttggcatctcgtcacctttttcctattcaagtaatcaaatggaggccttctgatgattacctggtggtggggtgttcagatggttctgtgtacgtctggcaaatggatactggtgcattggatcgttgtgtgatggggataacagcagttgagattctaaacgcttgtgatgaagctgttcctgctgctgttgattcacttagtcatccagcagtcaacctaaaacaagctatgacgagacgtagtcttgctgctcttaaaaatatggcccatcataagctacaaacccttgcaactaacctcttggcttctgaggcatctgacaagggaaatttacctaaatattctcataactccctgatggttcaagcaataaagacaaacctaacagacccggacatacatgtgctattctttgatgtggaagcgttgattattcaactcctgactgaagaagcctctaggccgaatactgctcttatttccccagagaatttgcaaaaagcatctggcagttcagacaaagggggctcttttttaactggaaaacgagcagcagttctcttccaacaagtgaaagaaacgatcaaagagaacatcaaggaacacctccttgatgatgaagaggaggatgaggagataatgaggcagagaagggaagaaagtgatcctgaatatcggtccagcaaatcaaagccattgaccctattagaatataatttaactatggacactgcaaagctgtttatgtcctgccttcacgcctggggtttgaatgaagtactggatgaagtttgcctggatcgccttggaatgctgaaaccccactgcaccgtatcgtttggcctcttgtcaagaggaggccatatgtcactgatgctgccgggttataatcagcctgcttgtaaactgtcacatgggaaaacagaagtaggaaggaagctgccagcgtctgagggagtaggaaagggaacttacggagtgtcccgtgccgtcaccacacagcatctcctgtctatcatttctttggcaaatactttaatgagtatgaccaatgcaacttttattggtgatcatatgaagaagggtcctaccaggccacctagaccaagcaccccagacctttctaaggcaaggggttcccctccaacttccagtaatattgtgcaaggacagattaaacaagttgctgcacctgtcgtttccgctcggtctgatgctgatcactctggctctgaccctccttctgctcctgctttacatacctgtttcttagtaaatgaaggttggagtcagttagctgctatgcactgtgttatgctgccagacctactgggattggataaatttaggcctccccttctggagatgctggcccgaagatggcaagatcgatgcttggaggtgagagaagccgcgcaggccctgcttctggcggaactgagaagaattgagcaggcaggcaggaaggaagccattgatgcctgggctccttacttacctcagtacatagaccacgtcatatcacctggagtcacatcagaagccgcgcagactatcaccacggctcctgatgcctcagggcctgaagcaaaagtccaggaggaagagcatgaccttgttgacgatgacatcaccactggttgcttatcaagtgtcccacaaatgaaaaaaatttctacatcttacgaggaaagacggaagcaagctaccgctattgttttacttggagtaataggagctgaatttggtgctgaaattgaacctcctaaactattgaccagacctcgaagctctagccaaattcctgagggattcgggttgactagtggtggatccaactactcgctggccagacatacttgcaaggcactgacgtttcttctgctacagcctccaagccccaaacttcctccacacagcactatccgaagaacagccattgatctgattggacgtgggttcactgtttgggagccttacatggatgtgtccgctgttctgatggggcttctcgaactttgtgccgatgccgagaaacaacttgccaacatcacaatggggttgcctctgagcccagcagctgactcggcccgctctgcgaggcatgccctctcgctcattgccaccgccagaccacccgccttcatcaccaccatagccaaagaggtacacagacatacggctcttgcagcaaatacccaatcacagcagaatatgcacacaacaactcttgcacgagctaaaggggaaattttgagagtcattgaaattcttattgaaaagatgcccacagatgttgtggatcttctcgtggaggttatggacatcattatgtactgccttgaaggatctttagttaaaaagaaaggtcttcaagaatgtttcccagccatctgcaggttctacatggtcagctattatgagcggaatcacagaatagcagttggagctcgccatggttcagtggccctgtacgacatccggactggaaaatgtcagacaatccatggacacaagggaccaatcactgcagtggcttttgctcctgatggaagatatcttgccacctactcaaacactgacagccacatttctttttggcagatgaacacgtcactgctgggaagcatcggcatgctgaactcggcacctcagctgcgctgcattaaaacctaccaggtgccccctgtgcagcccgcgtcccccggctcccacaatgccctcaagctggcccggctcatctggacttccaaccgcaacgtcatcctcatggcccatgacgggaaggagcaccgcttcatggtctaatgctgctgcctgccgccgtgactgcgttttagttctctaaattatccaagccgatgttgctctgtccttcctcacaccagattgttcccaggggcctgcccaccccagtgccatccagtggcacggccgggtcttgtcacttgtgcatgcttctcaggggcagaacccgctcgtgccatctgtcgattcagaggcacgcacacatgctctgcaggatgtggccatcctgtcaccaggtagtttttccctgccagagatggcaggggaaagccagtggttcctgggaacgctcttgttgcttggtgcaacagaagcacaaaaatcaataaacactgtgattgcactcccagcccagatcagcatttttagccatctcaaccgcacctctgaagtgctgcttgaatctggccgttctgacactgggtgttgaggtcatgtggcagtcctcacgattgaaattattgccctttgaattacctaaaatattgtttaccaaaaagattctgtgtttacatgttcttttcttctggtgattgctaggaaattactcaatccaatttcctagggtttagctaccaccttctttatcaacagctaaccaatttgagattcatgattaattatgtacacaaaaatattttccttgtagaaaatagttttccagacacttagccttctgaagtgctcatctcttgcttaaatgatagtctatttagtagtttaaaataaaaataatcactccctatgatctagttaatgtaattatccagtcactgtaactaatctcttgaagggacttttgtgataaagagccaagttcagaagcatagcgtgtaccgaaaatgaagactctcctatctactgctacagatcctgttgaagaaagagcttacccctttcccccggaaaacttgcaatcctgtagttcccatatgtgtggcatatgtcagttatgaaattattataattcagccttcaaactactactgatcaactaaaggaaagctaataaggtatttcttttaaacaagtattctggaaaagtaataactatggcacaaatgttcaggagtgtatataaaaatatgtgggctctcgatttatttgagcaaacattgcaatgagggtgttcattatgcttctaagtaagctttaactagaccactttcttcttatgtcagattgtgctggttctagctcataataatgaaaaaaatagaattatattttgtatgaattgtttctaacaaaccttgatctgtatatacttgtgaggggttgtttggttgcctaattgttgattggttggttagttgggcaaaatcatttattacatgcaaaaatagaaaattatttgttaaattcagagaaaatatgtgaagtttacaaaggaaccaaaatgataatgggagaatttagtcttaaaagtttaggttgtcagagtttatctgatatacaaaaaagtaggatcaaagtctaggaacaaacattggttatttcactgaaacagatttttaaagagcatattaagaaattaagaccattagatcatctctttcataatgatatgatgttatttccattgacggcaaatctatactgttccttggttttagagttgggtattctttcaaaagtgaatttaggcacatgcatgtacattgtatttataaagattatatatgtagtttccaaggaagaaacaaagacctatacagtttagactttatttgtttggtgaacgtgctgttgtgtttggcatagctagagaaatgtaaggtaaaaggctcactttgttttccagtgggtccagagtcttctctatacccaacatatgtttactttatgaacttaaatggaaattaatttattgtagactacatctctatttggaatgatgaggtaaatgtataccttagcattttctttaacaaaaatgttctgtgtgtcaggaaagaggtgtgagagtggtaggcagcctgccgcaaacacacggatggctccccccgccacgaaggttgagaacaaagccagggggcccagaggagcaatagccctgggccacaagcgtgggtaggcctttcacgtattccgtctgcacaggcaaccaaggccagtagaaagctatggctgcaaaaccctggggtggacgatgtttgatgattagacggtcatctctaactactaaactaatatctgcattcttgttaacataaatctctccttggctattttaatagccacagtcccaaacttcatcccagcttagatttctcagcactgaggtaaactctgcattgtcatcccagcgtacacctttaatgttttattgatttcactggcactgtatttggacctgtccttgtatatgtagagacatatgtggcttcattggtaatttacaagcaaaagatgacatgacgtgacacctgtatgaaaatgtgatgattgaactccctgtgtacagcgagtgaattaaaatgtctgcctctccagacatttcttaatgattccacttaatagactctatgtgtgctgaatgttcctgtgtacatatgtgtgttaaataaaacaattgtattgaagactgtttttctc

SEQ ID NO: 2428 - DNA, 4232 bp, Homo sapiens
aaaattgcgtttgagtttgccgcgagccgggccaatcggttttgccaacgcatgcccacgtgctggcgaacaaatgtaaacacggagatcgtgtgccgggcacttggtttcgtggtgggcaactgtgctgctgtttcttttggccgcggacaaggtcggcagaggtggacccctgcttgggagagctcttctcgctgtgctgacacccgcccctaacagtcacccaccccggggaaataatggggctcggaggcctcctcccagccagtgtccagcctaagcacatcggctcccgcagttcagaaaggtcccgaggcccgagtcaccatttccggctcagacctcgacccggaacgtggctgcccactgccacgcccactacgccccagtggctcgccccaggggacgaggggcaagaagcggcctccgagggcagcggccgaaggccattcggtccctggctcttcccagctcgcagagacccggaagcgctgcccggccgcctgcccctcttcagatcccccagcaccggaggagcagcgagggggctgcgtccaggccggctttcgggtcggcttaggcgaatccagctctcttttgcccctcccagaaggcccagccccgtccgggcggtgttcgggcggcgccgggccgggccccccgccgccccaggctcgctcataggcccggaacaccacagcccgcccagacttggctggcgccgagccgggggtggagccagcgggttcccgccaaaatcgcgtagctggtccttcccccgcgggctacgtcgcgccctcctttttttttcaaacccggagctgcactgggattggtggactgggcactcacgtggttaacggtcgcgggaagccgcggagcccgaacctgagactggacctgaggagacctcagcctcggtgctcgggccgccccgcctctgccggaaagtccgcgccgccgctgccgccaccgtccgcagcccgagcgccccggagccgcaggccgccgccgcgcagagacgccgcggctgcgactaggcgcgcccagccgcacgtggcggacccgcccccaggcccgcagtgtcctggaccccgcaggcctccgctctcctgtcctcggccccgtccccagggccgcgatgagcttcctgagccgacagcagccgccgccaccccgccgcgccggggcggcctgcaccttgcggcagaagctgatcttctcgccctgcagcgactgtgaggaggaggaagaagaggaggaggaggagggcagcggccacagcaccggggaggactcggcctttcaagagcccgactcgccgctgccgcccgcgcggagccccacggagcccgggcccgagcgccgccgctcgcccgggccggcccccgggagccccggcgagctggaggaggacctgttgctgcccggcgcctgcccgggcgcggacgaggcgggcggtggggcggagggcgactcgtgggaggaggagggcttcggctcctcgtcgccggtcaagtcgccggcggccccctacttcctgggtagctctttctcgccggtgcgctgcggcggcccaggagatgcgtcgccgcggggttgcggggcgcgccgggcgggcgaaggccgccgctcgccgcggccggaccacccgggcaccccgccacacaagaccttccgcaagctgcgactcttcgacaccccgcacacgcccaagagtttgctctccaaagctcggggaattgattccagctctgttaaactccggggtagttctctcttcatggatacagaaaaatcaggaaaaagggaatttgatgtgcgacagactcctcaagtgaatattaatccttttactccggattctttgttgcttcattcctcaggacagtgtcgtcgtagaaagagaacgtattggaatgattcctgtggtgaagacatggaagccagtgattatgagcttgaagatgaaacaagacctgctaagagaattacaattactgaaagcaatatgaagtcccggtatacaacagaatttcatgagctagagaaaatcggctctggagaatttggttctgtatttaagtgtgtgaagaggctggatggatgcatttatgccattaagcgatcaaaaaagccattggcgggctctgttgatgagcagaacgctttgagagaagtatatgctcatgcagtgcttggacagcattctcatgtagttcgatatttctctgcgtgggcagaagatgatcatatgcttatacagaatgaatattgtaatggtggaagtttagctgatgctataagtgaaaactacagaatcatgagttactttaaagaagcagagttgaaggatctccttttgcaagttggccgaggcttgaggtatattcattcaatgtctttggttcacatggatataaaacctagtaatattttcatatctcgaacctcaatcccaaatgctgcctctgaagaaggagacgaagatgattgggcatccaacaaagttatgtttaaaataggtgatcttgggcatgtaacaaggatctccagtccacaagttgaagagggcgatagtcgttttcttgcaaatgaagttttacaggagaattatacccatctaccaaaagcagatatttttgcgcttgccctcacagtggtatgtgctgctggtgctgaacctcttccgagaaatggagatcaatggcatgaaatcagacagggtagattacctcggataccacaagtgctttcccaagaatttacagagttgctaaaagttatgattcatccagatccagagagaagaccttcagcaatggcactggtaaagcattcagtattgctgtccgcttctagaaagagtgcagaacaattacgaatagaattgaatgccgaaaagttcaaaaattcacttttacaaaaagaactcaagaaagcacagatggcaaaagctgcagctgaggaaagagcactcttcactgaccggatggccactaggtccaccacccagagtaatagaacatctcgacttattggaaagaaaatgaaccgctctgtcagccttactatatactgagctactcctttcccacctccccctgaacactgtgacaagaggaagctaggttgaaatcactgatagaatccagtttgcaattactttctcgattggtgtcagtagttttactgattaggacttttattgtgaattacagttgaaagctgtattttgatgattgctatgtcaggctttcatctaatcttaccagtctgtcttctgtaggatgtgtcactgttggatgttacaccagcctttccagggttaaccactgtggtggtgtgctgcttatagtttgctgttgcattgtaataaaaggtgtctttccctgtagtgacctgtaaaaagtactcaagggctttattacagacataccctccctttgaaaagggacatgctaaaagactcattactactcagccttcaatgtacctgtgtgtccatcttatatttcttttttttttttaattgtgaattagacttgtatatcccactgggagcactttgtaggcattgcatgaaccatgggatgatgattctgtggaggtattgccttgtgaatttgctgctattttagttttgtctttgctgtaaacttgtagcattaaacaatcattgttgttaataggtcttctttttgaaacaattatgtgaaatgtatagctgcttttgatgaaaagcagctatttgccttttttttttttcctttgaactttgaagctagtgcattggaaaaatgcaccctttccctcctttggaatgctgtattaatgtagtataataattactggttttgtaacttgttctggtaatgtccttcccggactctttttaaatgtctccccctaagttttatacttgattgtattattagtctgtttttaaatgttttgcccggtttttctcttcaatatttgtgtatataaaccgatcttcgtgatactgtacatagctgtttgaaatgccagaatgacttctgacattccaagtttttcacaaaatatattttatctgtgattagccatttgactaataatactggctaacagatgttgaaaaaaattgtctgtttgttttctcattaattttggtctaaaacatgtttgcacttgtctttgacttgtgttttattaacattgattggcatattaaaagtcactctgagctt

SEQ ID NO: 2429 - DNA, 4489 bp, Homo sapiens
gtgcgtcgcgggggcggggccgcgcaggcgtaccgggtgccccggctctggagcataaacaagagcggggacgggatgaggcggcggttgatcccagggtggcgagtggcggcgaccgaggcggcgagcggggcccggcgccgaccctgagtgcagcctgacccgccctcgcgcgcgcgccctccccggccgggcccactcgccgcgcgcccagccatgaacctggcgagccagagcggggaggccggcgccggccagctgctcttcgccaacttcaaccaggacaacacagaagtgaaaggggcatcaagagcagctggtcttggccgtcgcgctgttgtctggtccctagctgttggtagtaagtccggttataaatttttctccctttcttctgtggataagctggaacagatctatgaatgcaccgatacggaagatgtgtgcattgtagagagattgttctccagcagcctagtggccatcgtcagccttaaagcaccaaggaagctaaaggtttgccactttaagaagggaactgagatctgcaactacagctactccaacacgattctggctgtgaagctcaacaggcagaggctgatagtatgcctggaggagtccctgtacatccacaacattcgggacatgaaggtgctgcatacgatcagggagacgcctccaaaccctgcaggcctgtgtgcgctgtcaatcaacaacgacaactgctacttggcgtacccagggagcgcgaccatcggagaggtgcaggtcttcgataccattaatttgagagctgcaaacatgattccggctcacgacagtcctttagcggcactggcctttgacgcaagtggaactaaacttgccacggcttcggagaaggggaccgtgattagggtattttccattccagaaggacaaaaactctttgagtttcggagaggagtaaagaggtgcgtgagcatctgctccctggccttcagcatggacggcatgttcctctccgcctccagcaacactgagaccgtgcacatcttcaaactcgagactgtgaaagaaaaacccccagaggagcccaccacctggaccgggtacttcgggaaagtgctcatggcctccaccagctacctgccttcccaagtgacagaaatgttcaaccagggcagagccttcgccacggtccgcctgccattctgcggccacaaaaacatctgctcgctagccacaattcagaagatcccgcggttgttggtgggtgccgccgacgggtacctgtacatgtacaacctggacccccaggagggcggcgagtgtgccctgatgaagcagcaccggctggacggcagtctggaaacgaccaatgagatcttggactctgcctctcacgactgccccttagtcactcagacatacggcgcagctgcaggaaaaggtacttacgtgccttcatccccaacgagacttgcctacacagacgacctgggtgctgtgggtggcgcctgcctggaggacgaggccagcgccctgcgcctggatgaggacagcgagcacccgcccatgattcttcggactgactgaacttgacctgtgacctctgacccggggagcagagaacactggcttcacagaggactttgtgcattgctgctatgaactttgacctgagtcgggggagaggatggcagagactttattaaaaaaaaaaaaagattgtagtggtagtctaactccataacgctgaggaaatacatcattttcacttcagtggcttttaaatcctgcttatgaattttagctttttgtttgtttgttttctctttttgccaaaattaactgtttggtgaagcccgcaaaacctcctcgctttgcatgcatgaacgtgccaagccagcataggggagctagaagccactttccagccacctgccgttgggttttttcatatctgtacataatgccgagtgcgtaaggaaaccgtggcgtcgcgcacagtgggtctgcttgtcaaggccagttctgcagtgacaggcccaggggctgcccaccaggtgtgctgggcagacttcagctgggacagaagtccgatctccctagggccccacctggaccattttccctccgttttattttgttaattaaattctttccaaattggatcgctctgggatttcttccatggtggacttttgtttctgatcttgttttccctgtggatattggaggacagcgaggttctttctgatactaaaaacctttctttcaggcagcaaatgaacttgaaaggttgcctggactcgctggagcaaaggaaagcgattttgtttgtataattaaatgatctgttcttctacttcactcttcctgttgaaaaactgtgtgatttttttttttttttaagtaaagtttgtagctcctcccatgcccaggaaagcacagaactcaagtgtggtggccgtctgagctgtcctttcgctggccccgctgtccgcaggggcttcctacctgtgtgagaggtcgtagcgggagacagcaacagagagtaggcggctgggccacgtccttcacagggcgtcatgtgcctttctattttcatcttagaaaatttcctcagcaaaccgatgagagattgtggttgcaagcttcagtatttgcctcgcttcccttcccttttcatatttacagaattaaaacaacctcaagtacctcagactctgcattccaaaccaaggcacccagcagccaaagtgtcgagggcatttaagtggcattaatggcaggagagatggttttagaatctatggagtggtggaagttacggatagaagggaaaaggcaaaaactatttaccctgcctttgcaggctggggtttttgaaccgaggaaggctgggacgcctgtttccagatggttgtcatggtcacgctgggcgaagagctggaggggagttgtcccctcagctgagcggctgcggtgaaatgccccagtgttcctgggttggctttacggcaaactaaatgcaggggacgctggagtccgactcacctacaccggcttcctcccagccgctggtgtgcggcacacacaacatctgcattaggcagaggtgcaagtgggctgattgaacttttccttcaaaacctgcttgtctgtcctggacctttgatgaaatgggatcccggtcacgcaggctgagacagtggggaccgccgaggccagagtgggctatgcttgagcagggatgagaagggccgcggcagcacgcagccttgacccacgcctgcgtcttgtggtgcaaggccagagggctctctctagaacctgaccgtgcactccatctcctgggagccacttttggcaagagtgagtgtggggggaaaaagtgtgcacaagagatacggaaccctgagctagggtttcctgtcaccaaagagtgagctgcatttccagttctgcgttaaagtatcgtttgttctggtgcctgcctgtggtggtgatttggagactcaaatttcctttgccaggtctcttttgtctttctttgggattggtagtatagaagatgctgggaattgtcttcctcgctcagcctcggcttcccgcactgtaagatgaggcagttgcagaggaggcctcggacgtcctgtgaccctcggcccacactcccccttgggtggccctggcagggctggctaggtgcgttccctgcagaccacgggaagccctgtgcttgcctgggtcagggctaagctgtgcgccctagaggagggaggaggactgcagattcttggtcgagaagaatgaagaggatttctgtgtttgctgagcagccattgtggagggttacccgcctccactttcccgttgcccatttcactgccaccagctcctcttcctctgctcgaacctatgagtcccagcctcactggcggcctcagacatgctcaggagtgacggggacagagggaggccgctgagttgcccgttagaactcttactgctgcgccagtgacccaggtggagagggaccctgaaccaaacagaacgtgtgctaattttccgaactccaaactgtacactcatattcatttttaaattgtatttttccaaacttcaaaaaggacgatgagcgtgggggataggaaacaaaacctgtaaacgttgtgaatgggctcagtggactctgggaccaaaccttctgtaatctctaaaacaatgggaccaagagctggatggaacctggagtcaaaaagaactgcttcagtccccgctgtaccgcctgcctagctgtgggagcaggcagggcgcctgggagcctgcgttttctggaccgttccatgggactcatccctacctcacagggctgttgtgaggtgttgtgtgactgcgtgtcctgcaaacgcccagctcggtgcccagccagcggtgggcacccaataaacgctacaacataaatgtgtcttctgcaattaaacacgatttttattca

SEQ ID NO: 2430 - DNA, 4295 bp, Homo sapiens
acagaactgactgaaaggaacctttgtctttcgtgtgaatgctcgtgaggggccatccttagagtggaaatgctcctgaggctccagcgaatcaagaccctcagacccccgggctgtccccaccccatgaccacatgttccgcaggcaccctcagcgctgtgccctgcgtgtcgcccaggcaggtgtttgtttttgagcgcagattctgcctgtggccatagccatgtggagatgttcacgcatgtacttccctttgtgatttcagccgatacggaagatgtgtgcattgtagagagattgttctccagcagcctagtggccatcgtcagccttaaagcaccaaggaagctaaaggtttgccactttaagaagggaactgagatctgcaactacagctactccaacacgattctggctgtgaagctcaacaggcagaggctgatagtatgcctggaggagtccctgtacatccacaacattcgggacatgaaggtgctgcatacgatcagggagacgcctccaaaccctgcaggcctgtgtgcgctgtcaatcaacaacgacaactgctacttggcgtacccagggagcgcgaccatcggagaggtgcaggtcttcgataccattaatttgagagctgcaaacatgattccggctcacgacagtcctttagcggcactggcctttgacgcaagtggaactaaacttgccacggcttcggagaaggggaccgtgattagggtattttccattccagaaggacaaaaactctttgagtttcggagaggagtaaagaggtgcgtgagcatctgctccctggccttcagcatggacggcatgttcctctccgcctccagcaacactgagaccgtgcacatcttcaaactcgagactgtgaaagaaaaacccccagaggagcccaccacctggaccgggtacttcgggaaagtgctcatggcctccaccagctacctgccttcccaagtgacagaaatgttcaaccagggcagagccttcgccacggtccgcctgccattctgcggccacaaaaacatctgctcgctagccacaattcagaagatcccgcggttgttggtgggtgccgccgacgggtacctgtacatgtacaacctggacccccaggagggcggcgagtgtgccctgatgaagcagcaccggctggacggcagtctggaaacgaccaatgagatcttggactctgcctctcacgactgccccttagtcactcagacatacggcgcagctgcaggaaaagcctacacagacgacctgggtgctgtgggtggcgcctgcctggaggacgaggccagcgccctgcgcctggatgaggacagcgagcacccgcccatgattcttcggactgactgaacttgacctgtgacctctgacccggggagcagagaacactggcttcacagaggactttgtgcattgctgctatgaactttgacctgagtcgggggagaggatggcagagactttattaaaaaaaaaaaaagattgtagtggtagtctaactccataacgctgaggaaatacatcattttcacttcagtggcttttaaatcctgcttatgaattttagctttttgtttgtttgttttctctttttgccaaaattaactgtttggtgaagcccgcaaaacctcctcgctttgcatgcatgaacgtgccaagccagcataggggagctagaagccactttccagccacctgccgttgggttttttcatatctgtacataatgccgagtgcgtaaggaaaccgtggcgtcgcgcacagtgggtctgcttgtcaaggccagttctgcagtgacaggcccaggggctgcccaccaggtgtgctgggcagacttcagctgggacagaagtccgatctccctagggccccacctggaccattttccctccgttttattttgttaattaaattctttccaaattggatcgctctgggatttcttccatggtggacttttgtttctgatcttgttttccctgtggatattggaggacagcgaggttctttctgatactaaaaacctttctttcaggcagcaaatgaacttgaaaggttgcctggactcgctggagcaaaggaaagcgattttgtttgtataattaaatgatctgttcttctacttcactcttcctgttgaaaaactgtgtgatttttttttttttttaagtaaagtttgtagctcctcccatgcccaggaaagcacagaactcaagtgtggtggccgtctgagctgtcctttcgctggccccgctgtccgcaggggcttcctacctgtgtgagaggtcgtagcgggagacagcaacagagagtaggcggctgggccacgtccttcacagggcgtcatgtgcctttctattttcatcttagaaaatttcctcagcaaaccgatgagagattgtggttgcaagcttcagtatttgcctcgcttcccttcccttttcatatttacagaattaaaacaacctcaagtacctcagactctgcattccaaaccaaggcacccagcagccaaagtgtcgagggcatttaagtggcattaatggcaggagagatggttttagaatctatggagtggtggaagttacggatagaagggaaaaggcaaaaactatttaccctgcctttgcaggctggggtttttgaaccgaggaaggctgggacgcctgtttccagatggttgtcatggtcacgctgggcgaagagctggaggggagttgtcccctcagctgagcggctgcggtgaaatgccccagtgttcctgggttggctttacggcaaactaaatgcaggggacgctggagtccgactcacctacaccggcttcctcccagccgctggtgtgcggcacacacaacatctgcattaggcagaggtgcaagtgggctgattgaacttttccttcaaaacctgcttgtctgtcctggacctttgatgaaatgggatcccggtcacgcaggctgagacagtggggaccgccgaggccagagtgggctatgcttgagcagggatgagaagggccgcggcagcacgcagccttgacccacgcctgcgtcttgtggtgcaaggccagagggctctctctagaacctgaccgtgcactccatctcctgggagccacttttggcaagagtgagtgtggggggaaaaagtgtgcacaagagatacggaaccctgagctagggtttcctgtcaccaaagagtgagctgcatttccagttctgcgttaaagtatcgtttgttctggtgcctgcctgtggtggtgatttggagactcaaatttcctttgccaggtctcttttgtctttctttgggattggtagtatagaagatgctgggaattgtcttcctcgctcagcctcggcttcccgcactgtaagatgaggcagttgcagaggaggcctcggacgtcctgtgaccctcggcccacactcccccttgggtggccctggcagggctggctaggtgcgttccctgcagaccacgggaagccctgtgcttgcctgggtcagggctaagctgtgcgccctagaggagggaggaggactgcagattcttggtcgagaagaatgaagaggatttctgtgtttgctgagcagccattgtggagggttacccgcctccactttcccgttgcccatttcactgccaccagctcctcttcctctgctcgaacctatgagtcccagcctcactggcggcctcagacatgctcaggagtgacggggacagagggaggccgctgagttgcccgttagaactcttactgctgcgccagtgacccaggtggagagggaccctgaaccaaacagaacgtgtgctaattttccgaactccaaactgtacactcatattcatttttaaattgtatttttccaaacttcaaaaaggacgatgagcgtgggggataggaaacaaaacctgtaaacgttgtgaatgggctcagtggactctgggaccaaaccttctgtaatctctaaaacaatgggaccaagagctggatggaacctggagtcaaaaagaactgcttcagtccccgctgtaccgcctgcctagctgtgggagcaggcagggcgcctgggagcctgcgttttctggaccgttccatgggactcatccctacctcacagggctgttgtgaggtgttgtgtgactgcgtgtcctgcaaacgcccagctcggtgcccagccagcggtgggcacccaataaacgctacaacataaatgtgtcttctgcaattaaacacgatttttattca

SEQ ID NO: 2431 - DNA, 1939 bp, Homo sapiens
accggcgacccggcccgtggagccggcgcgggcgggctgctgaggtggctgtcgccggctccgagctgcggcttcccgggccgagcccccgatggaggccgaggccgcggacgctcccccgggcggggttgagtcggcgctcagctgcttctctttcaaccaggactgcacatccctagcaactggaactaaagccgggtataagctgttttctctgagttctgtggagcagctggatcaagtccacggaagcaatgaaatcccggacgtctacatcgtggagcgcctcttctccagcagcctggtggtggtagtcagtcacacaaaaccacggcagatgaacgtgtatcacttcaagaaaggcacagagatctgtaattacagctactccagcaacatcttgtccataaggctgaaccggcaaaggctgctggtttgcctagaagagtccatttatattcacaacattaaagacatgaagctgttgaagaccctcctggatattcctgcaaacccaacaggtctatgtgctctctctatcaaccattccaattcttacctggcctatcctggaagcctgacttcaggggagattgtgctttatgatggaaactccctgaaaacagtctgcactattgctgcccatgagggaacactagctgccatcaccttcaatgcctcaggctccaaactagcaagtgcgtctgaaaaaggcacagtcatccgggtgttctctgtccctgatgggcaaaagctctatgagttccggagagggatgaaaaggtatgtgacaatcagctctctagtgttcagtatggattcacaattcctctgcgcctccagtaacaccgagacggtacacatcttcaagctggaacaggtcaccaacagtcgaccagaagagccttcgacctggagtggctacatgggaaagatgtttatggctgctaccaactacctccctacccaggtgtcagacatgatgcatcaggacagggcttttgccactgcacgcttgaacttctccggacagaggaacatctgtaccctctcaacgatccagaagttgccacggctgctagttgcgtcatccagtggacacctttatatgtacaatttggatcctcaggatggaggagagtgtgtcttaatcaaaacccacagcttgcttggctcaggaacaacagaagagaataaagaaaatgacctcagaccttccttacctcagtcttatgcagcgaccgtagccagaccaagtgcatcttcagcctccacggtgccaggttattctgaggacggcggggcgctgcgaggagaagttattcctgaacatgagtttgcgacgggaccagtgtgtcttgatgatgagaatgagtttcctcctataatcttgtgccgtggaaatcagaagggcaaaacgaagcagtcatgatgagaagcacacctcagaaatcaggacatcccccctatcaggtggttttggagaaaacaaggaaggcggaagaatggagtgcaattgtgtgagcagaaaggggggcaggaatcccgggtgctccactgcttaaaccacaggacctggttaactcctcaccaagcttcccacgaccctggttgccaatgggcgcgggagacattgtatacacatcatgctatttaaaatacgttcaaactatagtgtaaatgctaattaaccatattggtatataaccggaattttatattaaaaggggcctcctttttaaatatatgccgtgtaaaaaatgtacttataggaacatctctttgaattgtatttcttgtatattacatacttagagagagactcttttagccaggcaaagtcttttttggctgtggctggaataaatcatttattacttgggagtcccattttggacactaataataaaatcatggcaatgcaaaaaaaaaaaaaaaa

SEQ ID NO: 2432 - DNA, 1307 bp, Homo sapiens
cctgagtcccgggaggaaagtgctcgcccattcctgacctgtgacacgctcactgcgaaggcaggttattagaagagtcccatgaaaggtggctccacggtcccagcgacatgcaggggctcctcttctccactcttctgcttgctggcctggcacagttctgctgcagggtacagggcactggaccattagatacaacacctgaaggaaggcctggagaagtgtcagatgcacctcagcgtaaacagttttgtcactggccctgcaaatgccctcagcagaagccccgttgccctcctggagtgagcctggtgagagatggctgtggatgctgtaaaatctgtgccaagcaaccaggggaaatctgcaatgaagctgacctctgtgacccacacaaagggctgtattgtgactactcagtagacaggcctaggtacgagactggagtgtgtgcataccttgtagctgttgggtgcgagttcaaccaggtacattatcataatggccaagtgtttcagcccaaccccttgttcagctgcctctgtgtgagtggggccattggatgcacacctctgttcataccaaagctggctggcagtcactgctctggagctaaaggtggaaagaagtctgatcagtcaaactgtagcctggaaccattactacagcagctttcaacaagctacaaaacaatgccagcttatagaaatctcccacttatttggaaaaaaaaatgtcttgtgcaagcaacaaaatggactccctgctccagaacatgtgggatgggaatatctaacagggtgaccaatgaaaacagcaactgtgaaatgagaaaagagaaaagactgtgttacattcagccttgcgacagcaatatattaaagacaataaagattcccaaaggaaaaacatgccaacctactttccaactctccaaagctgaaaaatttgtcttttctggatgctcaagtactcagagttacaaacccactttttgtggaatatgcttggataagagatgctgtatccctaataagtctaaaatgattactattcaatttgattgcccaaatgaggggtcatttaaatggaagatgctgtggattacatcttgtgtgtgtcagagaaactgcagagaacctggagatatattttctgagctcaagattctgtaaaaccaagcaaatgggggaaaagttagtcaatcctgtcatataataaaaaaattagtgagtaaaaaaaaaaaaaaaaaaaaaaaaaaaaaaaaaaaaaaaaaaaaaaaaaaagaaaaaaaaaaaaaaaaaaaa

SEQ ID NO: 2433 - DNA, 1360 bp, Homo sapiens
gagctgccgtagcggacccagcacagccaggagcgtccgggatgagctcagccgcggccgaccactgggcgtggttgctggtgctcagcttcgtgtttggatgcaatgttcttaggatcctcctcccgtccttctcatccttcatgtccagggtgctgcagaaggacgcggagcaggagtcacagatgagagcggagatccaggacatgaagcaggagctctccacagtcaacatgatggacgagtttgccagatatgccaggctggaaagaaagatcaacaagatgacggataagctcaaaacccatgtgaaagctcggacagctcaattagccaagataaaatgggtgataagtgtcgctttctacgtattgcaggctgccctgatgatctcactcatttggaagtattattctgtccctgtggctgtcgtgccgagtaaatggataacccctctagaccgcctggtagcctttcctactagagtagcaggtggtgttggaattacctgttggattttagtctgtaacaaagttgtcgctattgtgcttcatccgttcagctgaacaggaggatggatacagccgcgaggctaaaaaacggatttcctcttcctagcttaaaatctgatttacactgttttgttttttaagaaacaaaagtgcatagtttagattttttttttgttgaatatgtttgttcttggactttatgagatagtcttataagaatcacgattttctacacctgtcattgagccaagaaagtccagtttatgacacgtatgtactagtgaacaccgtcctcgatctgtacgaaatgtgaaatgtttagggacatctccatgctgtcacttgtgatttgccctcttatgtattttggtcatattgccaactggaaagtcaaaattttctaacaactttaagtaagttctttgaagacttagtgctgtttttaatccagtttagaaagtaacttaattttaataccgctactaaaaattcgaaaatttcttctttaatcacattcaatatggttaaaagaacaacactaattgacattgcgtgggctttttctccctttgtttaaaatgtcatttgttgagcaagagttgtatagtattatctacttacttgaggctgttaatttttcattacagtgttttgtaaatgtatccacgagaccatgatgcattgttttgtgctcaacttgtgttttgtatttaaagcattttgaatgaagtgtattttataagcatttaatatttatgctctttagaatggaacacagaaaacaaaccttataagtcctgattaaattaatctgaaccaaaaaaaaaaaaaaaaaaaaaaaaaaaaaa

SEQ ID NO: 2434 - DNA, 5765 bp, Homo sapiens
cagccgcccctcctgcggccgctgcgggggccgccgcctgacttcggacaccggccccgcacccgccaggaggggagggaaggggaggcggggagagcgacggcggggggcgggcggtggaccccgcctcccccggcacagcctgctgaggggaagagggggtctccgctcttcctcagtgcactctctgactgaagcccggcgcgtggggtgcagcgggagtgcgaggggactggacaggtgggaagatgggaatgaggaccgggcggcgggaatgttctcacttctccggattccaccgggatgcaggactctagctgcccagccgcacctgcgaagagactacacttcccgaggtgctcagcggcagcgagggcctccacgcatgcgcaccgcggcgcgctgggcggggctggatgggctgtggtgggagggttgcagcgccgcgagaaaggcgagccgggccgggggcggggaaaggggtggggcaggaacgggggcggggacggcgctggaggggcgggtcgggtaggtctcccggagctgatgtgtactgtgtgcgccggggaggcgccggcttgtactcggcagcgcgggaataaagtttgctgatttggtgtctagcctggatgcctgggttgcaggccctgcttgtggtggcgctccacagtcatccggctgaagaagacctgttggactggatcttctcgggttttctttcagatattgttttgtatttacccatgaagacattgttttttggactctgcaaataggacatttcaaagatgagtgaaaaaaaattggaaacaactgcacagcagcggaaatgtcctgaatggatgaatgtgcagaataaaagatgtgctgtagaagaaagaaaggcatgtgttcggaagagtgtttttgaagatgacctccccttcttagaattcactggatccattgtgtatagttacgatgctagtgattgctctttcctgtcagaagatattagcatgagtctatcagatggggatgtggtgggatttgacatggagtggccaccattatacaatagagggaaacttggcaaagttgcactaattcagttgtgtgtttctgagagcaaatgttacttgttccacgtttcttccatgtcagtttttccccagggattaaaaatgttgcttgaaaataaagcagttaaaaaggcaggtgtaggaattgaaggagatcagtggaaacttctacgtgactttgatatcaaattgaagaattttgtggagttgacagatgttgccaataaaaagctgaaatgcacagagacctggagccttaacagtctggttaaacacctcttaggtaaacagctcctgaaagacaagtctatccgctgtagcaattggagtaaatttcctctcactgaggaccagaaactgtatgcagccactgatgcttatgctggttttattatttaccgaaatttagagattttggatgatactgtgcaaaggtttgctataaataaagaggaagaaatcctacttagcgacatgaacaaacagttgacttcaatctctgaggaagtgatggatctggctaagcatcttcctcatgctttcagtaaattggaaaacccacggagggtttctatcttactaaaggatatttcagaaaatctatattcactgaggaggatgataattgggtctactaacattgagactgaactgaggcccagcaataatttaaacttattatcctttgaagattcaactactgggggagtacaacagaaacaaattagagaacatgaagttttaattcacgttgaagatgaaacatgggacccaacacttgatcatttagctaaacatgatggagaagatgtacttggaaataaagtggaacgaaaagaagatggatttgaagatggagtagaagacaacaaattgaaagagaatatggaaagagcttgtttgatgtcgttagatattacagaacatgaactccaaattttggaacagcagtctcaggaagaatatcttagtgatattgcttataaatctactgagcatttatctcccaatgataatgaaaacgatacgtcctatgtaattgagagtgatgaagatttagaaatggagatgcttaagcatttatctcccaatgataatgaaaacgatacgtcctatgtaattgagagtgatgaagatttagaaatggagatgcttaagtctttagaaaacctcaatagtggcacggtagaaccaactcattctaaatgcttaaaaatggaaagaaatctgggtcttcctactaaagaagaagaagaagatgatgaaaatgaagctaatgaaggggaagaagatgatgataaggactttttgtggccagcacccaatgaagagcaagttacttgcctcaagatgtactttggccattccagttttaaaccagttcagtggaaagtgattcattcagtattagaagaaagaagagataatgttgctgtcatggcaactggatatggaaagagtttgtgcttccagtatccacctgtttatgtaggcaagattggccttgttatctctccccttatttctctgatggaagaccaagtgctacagcttaaaatgtccaacatcccagcttgcttccttggatcagcacagtcagaaaatgttctaacagatattaaattaggtaaataccggattgtatacgtaactccagaatactgttcaggtaacatgggcctgctccagcaacttgaggctgatattggtatcacgctcattgctgtggatgaggctcactgtatttctgagtgggggcatgattttagggattcattcaggaagttgggctccctaaagacagcactgccaatggttccaatcgttgcacttactgctactgcaagttcttcaatccgggaagacattgtacgttgcttaaatctgagaaatcctcagatcacctgtactggttttgatcgaccaaacctgtatttagaagttaggcgaaaaacagggaatatccttcaggatctgcagccatttcttgtcaaaacaagttcccactgggaatttgaaggtccaacaatcatctactgtccttctagaaaaatgacacaacaagttacaggtgaacttaggaaactgaatctatcctgtggaacataccatgcgggcatgagttttagcacaaggaaagacattcatcataggtttgtaagagatgaaattcagtgtgtcatagctaccatagcttttggaatgggcattaataaagctgacattcgccaagtcattcattacggtgctcctaaggacatggaatcatattatcaggagattggtagagctggtcgtgatggacttcaaagttcttgtcacgtcctctgggctcctgcagacattaacttaaataggcaccttcttactgagatacgtaatgagaagtttcgattatacaaattaaagatgatggcaaagatggaaaaatatcttcattctagcagatgtaggagacaaatcatcttgtctcattttgaggacaaacaagtacaaaaagcctccttgggaattatgggaactgaaaaatgctgtgataattgcaggtccagattggatcattgctattccatggatgactcagaggatacatcctgggactttggtccacaagcatttaagcttttgtctgctgtggacatcttaggcgaaaaatttggaattgggcttccaattttatttctccgaggatctaattctcagcgtcttgccgatcaatatcgcaggcacagtttatttggcactggcaaggatcaaacagagagttggtggaaggctttttcccgtcagctgatcactgagggattcttggtagaagtttctcggtataacaaatttatgaagatttgcgcccttacgaaaaagggtagaaattggcttcataaagctaatacagaatctcagagcctcatccttcaagctaatgaagaattgtgtccaaagaagttgcttctgcctagttcgaaaactgtatcttcgggcaccaaagagcattgttataatcaagtaccagttgaattaagtacagagaagaagtctaacttggagaagttatattcttataaaccatgtgataagatttcttctgggagtaacatttctaaaaaaagtatcatggtacagtcaccagaaaaagcttacagttcctcacagcctgttatttcggcacaagagcaggagactcagattgtgttatatggcaaattggtagaagctaggcagaaacatgccaataaaatggatgttcccccagctattctggcaacaaacaagatactggtggatatggccaaaatgagaccaactacggttgaaaacgtaaaaaggattgatggtgtttctgaaggcaaagctgccatgttggcccctctgttggaagtcatcaaacatttctgccaaacaaatagtgttcagacagacctcttttcaagtacaaaacctcaagaagaacagaagacgagtctggtagcaaaaaataaaatatgcacactttcacagtctatggccatcacatactctttattccaagaaaagaagatgcctttgaagagcatagctgagagcaggattctgcctctcatgacaattggcatgcacttatcccaagcggtgaaagctggctgcccccttgatttggagcgagcaggcctgactccagaggttcagaagattattgctgatgttatccgaaaccctcccgtcaactcagatatgagtaaaattagcctaatcagaatgttagttcctgaaaacattgacacgtaccttatccacatggcaattgagatccttaaacatggtcctgacagcggacttcaaccttcatgtgatgtcaacaaaaggagatgttttcccggttctgaagagatctgttcaagttctaagagaagcaaggaagaagtaggcatcaatactgagacttcatctgcagagagaaagagacgattacctgtgtggtttgccaaaggaagtgataccagcaagaaattaatggacaaaacgaaaaggggaggtctttttagttaagctggcaattaccagaacaattatgtttcttgctgtattataagaggatagctatattttatttctgaagagtaaggagtagtattttggcttaaaaatcattctaattacaaagttcactgtttattgaagaactggcatcttaaatcagccttccgcaattcatgtagtttctgggtcttctgggagcctacgtgagtacatcacctaacagaatattaaattagacttcctgtaagattgctttaagaaactgttactgtcctgttttctaatctctttattaaaacagtgtatttggaaaatgttatgtgctctgatttgatatagataacagattagtagttacatggtaattatgtgatataaaatattcatatattatcaaaattctgttttgtaaatgtaagaaagcatagttattttacaaattgtttttactgtcttttgaagaagttcttaaatacgttgttaaatggtattagttgaccagggcagtgaaaatgaaaccgcattttgggtgccattaaatagggaaaaaacatgtaaaaaatgtaaaatggagaccaattgcactaggcaagtgtatattttgtattttatatacaatttctattatttttcaagtaataaaacaatgtttttcatactgaatattaaaaaaaaaaaaaaaaaaaa

SEQ ID NO: 2435 - DNA, 2833 bp, Homo sapiens
ggcctggccggggcgggcggcgcgggggcggcatgagggcccgcggcccggggggctgaggcgcccgccgcctgccgcgggggccgctcgcgtcctccatggaggccggagaggaaccgctgctgctggccgaactcaagcccgggcgcccccaccagtttgattggaagtccagctgtgaaacctggagcgtcgccttctccccagatggctcctggtttgcttggtctcaaggacactgcatcgtcaaactgatcccctggccgttggaggagcagttcatccctaaagggtttgaagccaaaagccgaagtagcaaaaatgagacgaaagggcggggcagcccaaaagagaagacgctggactgtggtcagattgtctgggggctggccttcagcccgtggccttccccacccagcaggaagctctgggcacgccaccacccccaagtgcccgatgtctcttgcctggttcttgctacgggactcaacgatgggcagatcaagatctgggaggtgcagacagggctcctgcttttgaatctttccggccaccaagatgtcgtgagagatctgagcttcacacccagtggcagtttgattttggtctccgcgtcacgggataagactcttcgcatctgggacctgaataaacacggtaaacagattcaagtgttatcgggccacctgcagtgggtttactgctgttccatctccccagactgcagcatgctgtgctctgcagctggagagaagtcggtctttctatggagcatgaggtcctacacgttaattcggaagctagagggccatcaaagcagtgttgtctcttgtgacttctcccccgactctgccctgcttgtcacggcttcttacgataccaatgtgattatgtgggacccctacaccggcgaaaggctgaggtcactccaccacacccaggttgaccccgccatggatgacagtgacgtccacattagctcactgagatctgtgtgcttctctccagaaggcttgtaccttgccacggtggcagatgacagactcctcaggatctgggccctggaactgaaaactcccattgcatttgctcctatgaccaatgggctttgctgcacattttttccacatggtggagtcattgccacagggacaagagatggccacgtccagttctggacagctcctagggtcctgtcctcactgaagcacttatgccggaaagcccttcgaagtttcctaacaacttaccaagtcctagcactgccaatccccaagaaaatgaaagagttcctcacatacaggactttttaagcaacaccacatcttgtgcttctttgtagcagggtaaatcgtcctgtcaaagggagttgctggaataatgggccaaacatctggtcttgcattgaaatagcatttctttgggattgtgaatagaatgtagcaaaaccagattccagtgtactagtcatggatctttctctccctggcatgtgaaagtcagtcttagaggaagagattccacttgcacggcaacagagccttacgttaaattttcagtccagttatgaacagcaagtgttgaactctttctgcttgttttgattcaaagtgcagttactgatgttgttttgattatgcaactaagtaggcctccagagcctctctagtggcagagcagctcacactccctccgctgggaacgatggcttctgcctagtacctatccttgtgtttctgatgcagtggtagcattggttcaagttctctcctgctgtggtcagagttgcttcgatgttggccaagtgcttttcttcttgggctcccttctgacctgcaggacagttttcctggagccatttggtatgaggtattaatttagcttaactaaattacaggggactcagaggccgtgctcctgaccgatccagacactattactggctttttttttttttttttaacaatggtgtgcatgtgcaggaaatgacaaatttgtatgtcagattatacaaggatgtattcttaaaccgcatgactattcagatggctactgagttatcagtggccatttattagcatcatatttatttgtattttctcaacagatgttaaggtacaactgtgtttttctcgattatctaaaaaccatagtacttaaattgaacagttgcaaagatgtcttaattgtgtaaagaattggtgtagtcatgactttagctgatactcttatgtacgagatctgtctctgctgtttaacttcattggattaatcagctggtttcaactctactgcgaaacaaaaatagctccttaaaagtactgttctccttcagtggcatgtagttatctaatcaagacacctcattcaaacaaaacctgccttaggaaaatttaatatattttaaattattttaaaagaaatacaacatcttattctttagctttcttaatcggtgctttatggaggccagtgtaacgttacatgactcgttgagaaagttgaggaatttcctctaccacctttgttgcttgaagaaaaacatgtcttttcaaaatgagaggctttcattgaagaaaagaaaaaaacaacagttaaaagcttttggctctctgtttcatttttttccattaagaaaaaaaaaagtccccttttaaaacaagcagggctgggtgtgacggcacatgcctgtaatcccagcactttgggaggctgaggtgggaggactgcttgagcccaggagttcaagatcagcctgggcaacagagtgagataagacccaatctttatttaaaaaataaataaataaatagccaaaaaaaaaaaaaaaaaa

SEQ ID NO: 2436 - DNA, 2204 bp, Homo sapiens
atgcagcgctccagggcgggcgcggacgaggcggccctactcctggccgggctggccctgcgggagctggagcccgggtgcggctctcccggtcgggggcggcgggggccgcggcctgggcctggagacgaggcggcgcccgcgctgggccgcagagggaagggcagcggcggccccgaggccggggcggacggactgagccgcggggagcggggtccccggcgcgcggcggttccggagctcagcgcgcagcctgcgggcagcccacgggccagcctggcggggtccgacggcggcggcggtggcggcagcgcccgatccagcggcatcagcctgggctacgaccagcgccacggcagcccgcgctccggtcgctcggacccgcgtcccggtcccgggccgccttcggtgggcagcgcccgctccagcgtttccagcctcggctcccggggctcggccggcgcctacgctgacttcctcccgcccggcgcctgccccgcgcccgctcgctccccggagcctgcggggccggctcccttcccgctgcctgcactcccgctgccccctggccgggagggcggcccaagcgcggccgagcggcggctggaggcgctcacccgggagctggagcgggcgctcgaggcgcgcacggcgcgggactacttcggcatttgcatcaagtgtgggcttggcatctacggagcccagcaggcgtgccaggcaatggggagtctttatcacactgactgcttcacctgcgactcgtgtgggagacgactccgtgggaaggcgttctacaacgtgggtgagaaagtgtactgccaggaggacttcctgtactccgggttccagcagacggccgacaaatgcagcgtgtgtggacatctcatcatggaaatgatcctgcaggccctgggcaagtcctaccacccaggctgcttccggtgctccgtgtgcaatgagtgcctggacggggttcccttcaccgtggacgtggagaacaacatctactgcgtgcgagactatcacacggtttttgcaccaaaatgcgcctcctgtgcccgtcctatcctccctgcacagggctgcgagacaaccatccgtgtggtgtccatggacagagactaccacgtggcatgttaccactgtgaggactgcgggctgcagctgagcggggaggagggacgccgttgctatcccctggcgggccacctactgtgtcgtcgttgccacctgcggcgcctccaacctgggcctcttccctcacccactgtgcacgtcactgagctctgagcaggggaaaacccgtccctgggccggggtgggtgtgggtgtggagggagggcccgcgtgggtggccctggtcagcgtcaggggagctccctccaatcagtttcccaccgagctgctgtctgcaggggccggacccccgcgtggaagcttctatttattcaccgtctgtgcctgctcaagtcacttccctgcgggccctgcctcccacccaccccatcaccagctttccacttggaggccccctgtgccctgcagcctcagggtaggccgtgggtcaccaggctggagagggcccctgccttggccaggggtgcgaggtgacccggctgcattgctgggtgggagctgctgtctgttgttcaggggcctggcccccgccctcccccccgaccccgacctcgcaaagcgcactcccgggcagggtgtggtctggaaggcggggctggcggggacatgggtgttcctgcatctcctagcgcagttcctgctggtgggtggaagggtgcctggtttaggcggggtcccaggagggggtgaggggtgacacccttggggagggggcctgcaaagggcactgcctgtggccacgtggtgtctgtgggaattggtcctggggactttgatgggtgtttgcggccccagttgccgccctgctccctcttccagggctcctggcttgggccccccgacccccctgctcagctcgggaaaatccccgtgcggctccagccccgggtcacgctcaggagcgatgagaggggcgccctggccacgcttcaggaaagcctgtgtctgcgcgcggggcaaggggctccacgacaaaaggacaagatttgacttaaattaagtttttcccttgaggatattttcattttctttaaaagaatataattttcttctaagatcttgga

SEQ ID NO: 2437 - DNA, 4120 bp, Homo sapiens
ggctgctggcggcctgggctgccggggccgacgcctgggtggctgctgccgccgcgcctgctgcgagatggcgatcttgggcgcggaagggtgagggcgcccgccgcaggaggaggtgccgctgccgtggccgcccggctgccgggagccgacagcttcgcgccggggttgtctcctcacagactatgagctccttgaaagagggaatcgtgtcttactcatctttgtatccccagtgtctagcagttcctgatacatagttttagctgaattttgggacatggccactgcttcaccaaggtctgatactagtaataaccacagtggaaggttgcagttacaggtaactgtttctagtgccaaacttaaaagaaaaaagaactggttcggaacagcaatatatacagaagtagttgtagatggagaaattacgaaaacagcaaaatccagtagttcttctaatccaaaatgggatgaacagctaactgtaaatgttacgccacagactacattggaatttcaagtttggagccatcgcactttaaaagcagatgctttattaggaaaagcaacgatagatttgaaacaagctctgttgatacacaatagaaaattggaaagagtgaaagaacaattaaaactttccttggaaaacaagaatggcatagcacaaactggtgaattgacagttgtgcttgatggattggtgattgagcaagaaaatataacaaactgcagctcatctccaaccatagaaatacaggaaaatggtgatgccttacatgaaaatggagagccttcagcaaggacaactgccaggttggctgttgaaggcacgaatggaatagataatcatgtacctacaagcactctagtccaaaactcatgctgctcgtatgtagttaatggagacaacacaccttcatctccgtctcaggttgctgccagacccaaaaatacaccagctccaaaaccactcgcatctgagcctgccgatgacactgttaatggagaatcatcctcatttgcaccaactgataatgcgtctgtcacgggtactccagtagtgtctgaagaaaatgccttgtctccaaattgcactagtactactgttgaagatcctccagttcaagaaatactgacttcctcagaaaacaatgaatgtattccttctaccagtgcagaattggaatctgaagctagaagtatattagagcctgacacctctaattctagaagtagttctgcttttgaagcagccaaatcaagacagccagatgggtgtatggatcctgtacggcagcagtctgggaatgccaacacagaaaccttgccatcagggtgggaacaaagaaaagatcctcatggtagaacctattatgtggatcataatactcgaactaccacatgggagagaccacaacctttacctccaggttgggaaagaagagttgatgatcgtagaagagtttattatgtggatcataacaccagaacaacaacgtggcagcggcctaccatggaatctgtccgaaattttgaacagtggcaatctcagcggaaccaattgcagggagctatgcaacagtttaaccaacgatacctctattcggcttcaatgttagctgcagaaaatgacccttatggacctttgccaccaggctgggaaaaaagagtggattcaacagacagggtttactttgtgaatcataacacaaaaacaacccagtgggaagatccaagaactcaaggcttacagaatgaagaacccctgccagaaggctgggaaattagatatactcgtgaaggtgtaaggtactttgttgatcataacacaagaacaacaacattcaaagatcctcgcaatgggaagtcatctgtaactaaaggtggtccacaaattgcttatgaacgcggctttaggtggaagcttgctcacttccgttatttgtgccagtctaatgcactacctagtcatgtaaagatcaatgtgtcccggcagacattgtttgaagattccttccaacagattatggcattaaaaccctatgacttgaggaggcgcttatatgtaatatttagaggagaagaaggacttgattatggtggcctagcgagagaatggtttttcttgctttcacatgaagttttgaacccaatgtattgcttatttgagtatgcgggcaagaacaactattgtctgcagataaatccagcatcaaccattaatccagaccatctttcatacttctgtttcattggtcgttttattgccatggcactatttcatggaaagtttatcgatactggtttctctttaccattctacaagcgtatgttaagtaaaaaacttactattaaggatttggaatctattgatactgaattttataactcccttatctggataagagataacaacattgaagaatgtggcttagaaatgtacttttctgttgacatggagattttgggaaaagttacttcacatgacctgaagttgggaggttccaatattctggtgactgaggagaacaaagatgaatatattggtttaatgacagaatggcgtttttctcgaggagtacaagaacagaccaaagctttccttgatggttttaatgaagttgttcctcttcagtggctacagtacttcgatgaaaaagaattagaggttatgttgtgtggcatgcaggaggttgacttggcagattggcagagaaatactgtttatcgacattatacaagaaacagcaagcaaatcatttggttttggcagtttgtgaaagagacagacaatgaagtaagaatgcgactattgcagttcgtcactggaacctgccgtttacctctaggaggatttgctgagctcatgggaagtaatgggcctcaaaagttttgcattgaaaaagttggcaaagacacttggttaccaagaagccatacatgttttaatcgcttggatctaccaccatataagagttatgaacaactaaaggaaaaacttctttttgcaatagaagagacagagggatttggacaagaatgaatgtggcttcttattttggaggagctcttgcatttaaataccccagccaagaaaaattgcacagatagtgtatataagctgttcattctgtacagtgaattttccgaacctctcaaagtatgttttccgttcttccacagaaatatgcaaaacagttcatccttttctactttatttattgttcccttgaaatgactgaccaggaaaaagatcatccttaaattttgaagcaagtgagagactttattaaaaatacatatatatctatataaacatatatgatagtggctctagttttatagagctccaagtgtattaaacatgacagccattcattcataaagatctggatttgctttaccttgttaatattatctaggggaaaaagtgcaaattgctccatgttcttctctcccttatgtaacatctcctgagggtgtttagttgcatggctgttcagaaaggtattaagggcttaggccaaatcttactttgagtatgttaaaaaaaaaaaaatgctgctggcttttctgaagacaggtgcttgaacttgtcagtttgttttaaataaatacaatagttgaaaatttttctctgttacatcagtaatattgttaaagtaatggatagaaccataacttacacatgaaagtcatatactagatccaatactatttagtttattatcgaaattggaaggattcattgagcagcatagaagtttgtttacatgttactttgagatgctaggtatttgtggaattaaaaagaatcaggctcttttgtactttgtttttaaatctgtgatgcttttcaaatttaattcataataaattgatgcaatttcatacttaggaacatacaaaaggtaatgtaaactctgccacttttttgtgttcaaaattttggtttttatgaagccagatggattgaagagttacataagcatttgaatgctctaatataaggctaatgattttctgttagtgtttgaatatcttcattcctctcaaattcataacagttctatttaactgaattaaataaccatatgaaaaaaaaaaaaaaaaa

SEQ ID NO: 2438 - DNA, 2659 bp, Homo sapiens
ccgcttctgtggccacggcagatgaaacagaaaggctaaagagggctggagtcaggggacttctcttccaccagcttcacggtgatgatatggcatctgccagctctagccgggcaggagtggccctgccttttgagaagtctcagctcactttgaaagtggtgtccgcaaagcccaaggtgcataatcgtcaacctcgaattaactcctacgtggaggtggcggtggatggactccccagtgagaccaagaagactgggaagcgcattgggagctctgagcttctctggaatgagatcatcattttgaatgtcacggcacagagtcatttagatttaaaggtctggagctgccataccttgagaaatgaactgctaggcaccgcatctgtcaacctctccaacgtcttgaagaacaatgggggcaaaatggagaacatgcagctgaccctgaacctgcagacggagaacaaaggcagcgttgtctcaggcggagagctgacaattttcctggacgggccaactgttgatctgggaaatgtgcctaatggcagtgccctgacagatggatcacagctgccttcgagagactccagtggaacagcagtagctccagagaaccggcaccagccccccagcacaaactgctttggtggaagatcccggacgcacagacattcgggtgcttcagccagaacaaccccagcaaccggcgagcaaagccccggtgctcggagccggcaccgccagcccgtcaagaactcaggccacagtggcttggccaatggcacagtgaatgatgaacccacaacagccactgatcccgaagaaccttccgttgttggtgtgacgtccccacctgctgcacccttgagtgtgaccccgaatcccaacacgacttctctccctgccccagccacaccggctgaaggagaggaacccagcacttcgggtacacagcagctcccagcggctgcccaggcccccgacgctctgcctgctggatgggaacagcgagagctgcccaacggacgtgtctattatgttgaccacaataccaagaccaccacctgggagcggccccttcctccagggtaggtcatcaactgagaagacctgagactctggaactgacaccatgagtcacccaatggcttcttgaaacggtccctttctgcggaggtagcatagcacagtgacgtttattccgggtcacttgattgcttttcctatccacttaccttaatattgctcccatgtcttaggacatattagaattattagaagatctctgggaaacaaaaggcgcatgggaggccaagatttagagtgttgatgcattccgccgtaccctatgcccagcctgtccctaaaggcagagtgcttcttattcggcagggcttcgtgagaatgccgccaagttatccaaaaccaaaggatgagagaggcttccaagagagggaagactgtccaagttcaaggagaaggggtttggttccctgtctgccagggacagaaagttctttccacatgtgtctcctggtcccgagagctttcaaaaggggatgtattctgctccaagaaagaatcacctcccagtaaagtagccatgaagggctcctgtataaaatatgcacacttcccctgccctgagtttgtggagggaaaggctgtcggaagtagggactcttaggagagcccgtgtgccctgtttggttcagctgtcaggcgtgtgccacacacatcccacctcatcttctggtcccataattctccatggatgggctgcttttagctccagttttccagtagaatgcttgagttttccttttttccgtacctcctggaggatgaaactcataacctgtcatcatcagtactcactgtgttttccactttgacttgaagtcaaatgaagttaccaaagttaaacatggacttctcaaattagaaaaaaacaaacaacaaaaaaacaggttaagtgttttgttatgaaaattatgaaaatgttcttattattatggaaaatttcaaatagatatagagagaataatgttacaaacccccacatactcaacatttagcttcaaaaattatcaactcatggcgggttttgtttcatctgtacaaactagtcggcacactatgatggcctgtggacaaaatccggccctctgactgtttttgtaaataaggttttattggaacacagccacacatatttgttgacttattgtttttggctgtttttgtacttcattggcagagttgagtaattgcagcagactctatggcttgcaaaacctaaaataattactttgtgtagcgctttatagaaaaaatttgctaactcccgatctgtaacccccaacctatccgccgcaccctgatctaggtaattttgaagcaaatcccaaatgtcacatcatctatccatatttcactatgtatttctaaaacatattcttttattcaaaataaaactctaatatcattaacagtattttgtttatattatcaaatacccagtcaatatttgactttctataattgtgtcacaaattaaacattgactttaacagtatgtattacacacttgtactttgtgtactttataacatgtgcactttaaaacagcaggagctctgtgtaaaaaaaaa

SEQ ID NO: 2439 - DNA, 816 bp, Homo sapiens
atggccctgaggtctgtagaacgcctggcagaggtgtacagtgaggagggcccagtgctgtgtggcaacttctcaactccactgtggagatttgaatgggagcccagtgatgaggaacctcagcaagaggaaccaccaactgaaagtcgggatcctacacctgtacctgacctggaaactgatctccaggagctgtctcagtcaaagactggggatgaatgcagagatggtcccgatgacaaggggaagattctgccaaaatcagagcaatttaaaatgccagaaggagaaatcatccagctttatgataccatagtttcagtcgggggaacttggcccaaggctcatgtgaatacacaaacgtgtaccagctgtgggaggaaatgttgtgacttctttcttgctaactataacacatcagataggtccatagatcagtcctcccagaagttgagtgtgagtgaacatgagggaaaggccacaactaggaaggaaggagggccttggcgcaaaggggatcgggttaaaatggggcacgtgttgtgggtgctgttggagccatggtcccaggagcccagtgatgaggagcctcaacaacaagaaccaccaactgaaagttgggatcctacacctggtcaggagagagatcagggtgcagctgagattcaagtgcctgacctggaaactgatctccaggagctgtctgagtcaaagactggggatgaatgcagagatggtcctgatgtccaggagaaaattctgctaaatttagagcaatttaaaatgccagaaggagaaaaaggtgctcagttgtag

SEQ ID NO: 2440 - DNA, 1836 bp, Homo sapiens
ggcgctgggcggctgcggcgcgcggtgcgcggtgcgtagtctggagctatggtggtggtggcagccgcgccgaacccggccgacgggacccctaaagttctgcttctgtcggggcagcccgcctccgccgccggagccccggccggccaggccctgccgctcatggtgccagcccagagaggggccagcccggaggcagcgagcggggggctgccccaggcgcgcaagcgacagcgcctcacgcacctgagccccgaggagaaggcgctgaggaggaaactgaaaaacagagtagcagctcagactgccagagatcgaaagaaggctcgaatgagtgagctggaacagcaagtggtagatttagaagaagagaaccaaaaacttttgctagaaaatcagcttttacgagagaaaactcatggccttgtagttgagaaccaggagttaagacagcgcttggggatggatgccctggttgctgaagaggaggcggaagccaaggggaatgaagtgaggccagtggccgggtctgctgagtccgcagcactcagactacgtgcacctctgcagcaggtgcaggcccagttgtcacccctccagaacatctccccatggattctggcggtattgactcttcagattcagagtctgatatcctgttgggcattctggacaacttggacccagtcatgttcttcaaatgcccttccccagagcctgccagcctggaggagctcccagaggtctacccagaaggacccagttccttaccagcctccctttctctgtcagtggggacgtcatcagccaagctggaagccattaatgaactaattcgttttgaccacatatataccaagcccctagtcttagagataccctctgagacagagagccaagctaatgtggtagtgaaaatcgaggaagcacctctcagcccctcagagaatgatcaccctgaattcattgtctcagtgaaggaagaacctgtagaagatgacctcgttccggagctgggtatctcaaatctgctttcatccagccactgcccaaagccatcttcctgcctactggatgcttacagtgactgtggatacgggggttccctttccccattcagtgacatgtcctctctgcttggtgtaaaccattcttgggaggacacttttgccaatgaactctttccccagctgattagtgtctaaggaatgatccaatactgttgcccttttccttgactattacactgcctggaggatagcagagaagcctgtctgtacttcattcaaaaagccaaaatagagagtatacagtcctagagaattcctctatttgttcagatctcatagatgacccccaggtattgtcttttgacatccagcagtccaaggtattgagacatattactggaagtaagaaatattactataattgagaactacagcttttaagattgtacttttatcttaaaagggtggtagttttccctaaaatacttattatgtaagggtcattagacaaatgtcttgaagtagacatggaatttatgaatggttctttatcatttctcttccccctttttggcatcctggcttgcctccagttttaggtcctttagtttgcttctgtaagcaacgggaacacctgctgagggggctctttccctcatgtatacttcaagtaagatcaagaatcttttgtgaaattatagaaatttactatgtaaatgcttgatggaattttttcctgctagtgtagcttctgaaaggtgctttctccatttatttaaaactacccatgcaattaaaaggtacaatgcaaaaaaaaaaaaaaaaa

SEQ ID NO: 2441 - DNA, 2867 bp, Homo sapiens
ctgagagcgcgcaggtgagcgggccagctgatagctacagcctagcaatagctaggatacctaggcactgaactgaatcccctcttctgccctccttcttctgcgcccgctcttctgccctggctcagctctccgctgacttgagaggacacactggtcaggactctttgtgaggagctgctgagtgtcggtgcccccgacagatcggctacaccctgcctgaggggctgcgaaaggagccgccacggaagccgctgttctcatgactcttcacgtccctggagttggactctggatggggcgctgggatgcttgcttttgtcttgttcaagtttcacagcaagtatgttgacgattggaatcggggccaatcaagagtcaagttcaaagtggtactcctgggctttccatcccagactccaagtcgaatctgagtctagaagagagcggtttcttgctctaactagtgaatctctgttcccaaactggacttgacagagctctcctcacctatacttggactgtagcggccatagggttctcttggggatgggtgggagggtgctatgaacacaagaccacaacattcagaaagaacctcgacaatggacagagtttatgaaattcctgaggagccaaatgtggatccggtttcatctctggaggaagatgtcatccgtggagccaacccccgatttacttttccatttagcatccttttctccacctttttgtactgtggggaggctgcatctgctttgtacatggttagaatctatcgaaagaatagtgaaacttactggatgacatacaccttttctttctttatgttttcatccattatggtccagttgaccctcatttttgtccacagagatctagccaaagataaaccgctatcattatttatgcatctaatcctcttgggacctgttatcagatgtttggaggccatgattaagtacctcacactgtggaagaaagaggagcaggaggagccctatgtcagcctcacccgaaagaagatgctaatagatggcgaggaggtgctgatagaatgggaggtgggccactccatccggaccctggctatgcaccgcaatgcctacaaacgtatgtcacagatccaagccttcctgggctcagtgccccagctgacctatcagctctatgtgagcctgatctctgcagaggttcccctgggtagagttgtgctaatggtattttccctggtatctgtcacctatggggccaccctttgcaatatgttggctatccagatcaagtacgatgactacaagattcgccttgggccactagaagtcctctgcatcaccatctggcggacattggagatcacttcccgcctcctgattctggtgctcttctcagccactttgaaattgaaggctgtgcccttcctagtgctcaacttcctgatcatcctctttgagccctggattaagttctggagaagtggtgcccagatgcccaataacattgagaaaaacttcagccgggtcggcactctggtggtcctgatttcagtcaccatcctctatgctggcatcaacttctcttgctggtcagctttgcagttgaggttggcagacagagatctcgtcgacaaagggcagaactggggacatatgggcctgcactatagtgtgaggttggtagagaatgtgatcatggtcttggtttttaagttctttggagtgaaagtgttactgaattactgtcattccttgattgccttgcagctcattattgcttatctgatttccattggcttcatgctccttttcttccagtacttgcatccattgcgctcactcttcacccataatgtagtagactacctccattgtgtctgctgtcaccagcaccctcggaccagggttgagaactcagagccaccctttgagactgaagcaaggcaaagtgttgtctgattctattttctgggtattttaggaagagttgggagttgccaagagtaaccatgaaattgaacgaaaggatgaggttcatgggtgagatacccatcagtacattttcttgacttttctgttaagcctatcagaagaaagagcaactcccaaataggttttattttcttaagagttaccactatgtttggaaacagggggtatcgactatatagttgaaagggtcagaaataccattcacacccttcttacccaagtcaattggaataacttgtcttcaaacactttaggctctctaaagtgaccttctagctctgctcatttgcttgatgcatttctgagctttcctgggctgagctgaaggcccagaatcccgctagaatatatcctgactgatcagaggatatgacagcttaccagctaagagtacctcccaggaaacagtctgactaatgtggaacctgcaactgtcagtgtggctggggtctttttaattccagtgagaagctctggctgagaagaaaatcaccactattaaaaaagctgctccccaagcagattagctctctgttaggattttactagtggccattcagcaaggacctctctttacagtggcacttcataggcacactctaaggagaaagtgcagagtagaattccttcagggcataagccaaaatgactctttttctcagggacctgcatgggcctccagcttgtctattggaattgttaagtgaagcctctcacttagtgcctcattagcagagatttcctccaacccagcttttctgtgctcttggtattttactacttgatgtggacctcagagaagctgaactgtaattgaaaatgtttccgatgtgtggaagaaatgaagactgctttgtgaaaaaaaaaaaaaaaaaaaaa

SEQ ID NO: 2442 - DNA, 1491 bp, Homo sapiens
cactcagaaaggccgctgggtgcggggagcgcagaggcggtgcagggcggctggctcgcctcggcgtgcagtgcgcgtgcgtggagctgggagctaggtcctcggagtgggccagagatggcggcggccgacggggctttgccggaggcggcggctttagagcaacccgcggagctgcctgcctcggtgcgggcgagtatcgagcggaagcggcagcgggcactgatgctgcgccaggcccggctggctgcccggccctactcggcgacggcggctgcggctactggaggcatggctaatgtaaaagcagccccaaagataattgacacaggaggaggcttcattttagaagaggaagaagaagaagaacagaaaattggaaaagttgttcatcaaccaggacctgttatggaatttgattatgtaatatgcgaagaatgtgggaaagaatttatggattcttatcttatgaaccactttgatttgccaacttgtgataactgcagagatgctgatgataaacacaagcttataaccaaaacagaggcaaaacaagaatatcttctgaaagactgtgatttagaaaaaagagagccacctcttaaatttattgtgaagaagaatccacatcattcacaatggggtgatatgaaactctacttaaagttacagattgtgaagaggtctcttgaagtttggggtagtcaagaagcattagaagaagcaaaggaagtccgacaggaaaaccgagaaaaaatgaaacagaagaaatttgataaaaaagtaaaagaattgcggcgagcagtaagaagcagcgtgtggaaaagggagacgattgttcatcaacatgagtatggaccagaagaaaacctagaagatgacatgtaccgtaagacttgtactatgtgtggccatgaactgacatatgaaaaaatgtgattttttagttcagtgacctgttttatagaattttatatttaaataaaggaaatttagattggtccttttcaaaattcaaaaaaaaaagcaacatcttcatagatgaatgaaacccttgtataagtaatacttcagtaataattatgtatgttatggcttaaaagcaagtttcagtgaaggtcacctggcctggttgtgtgcacaatgtcatgtctgtgattgccttcttacaacagagatgggagctgagtgctagagtaggtgcagaagtggtaggtcagctacaaatttgaggacaagataccaaggcaaaccctagattggggtagagggaaaagggttcaacaaaggctgaactggattcttaaccaagaaacaaataatagcaatggtggtgcaccactgtaccccaggttctagtcatgtgttttttaggacgatttctgtctccacgatggtggaaacagtggggaactactgctggaaaaagccctaatagcagaaataaacattgagttgtacgagtctgaaaaaaaaaaaaaaaaaaaaaaa

SEQ ID NO: 2443 - DNA, 3714 bp, Homo sapiens
cggggccggcgttctagcgcatcgcggccgggtgcgtcactcgcgaagtggaatttgcccagacaagcaacatggctcggaaacgcgcggccggcggggagccgcggggacgcgaactgcgcagccagaaatccaaggccaagagcaaggcccggcgtgaggaggaggaggaggatgcctttgaagatgagaaacccccaaagaagagccttctctccaaagtttcacaaggaaagaggaaaagaggctgcagtcatcctgggggttcagcagatggtccagcaaaaaagaaagtggccaaggtgactgttaaatctgaaaacctcaaggttataaaggatgaagccctcagcgatggggatgacctcagggactttccaagtgacctcaagaaggcacaccatctgaagagaggggctaccatgaatgaagacagcaatgaagaagaggaagaaagtgaaaatgattgggaagaggttgaagaacttagtgagcctgtgctgggtgacgtgagagaaagtacagccttctctcgatctcttctgcctgtgaagccagtggagatagagattgaaacgccagagcaggcgaagacaagagaaagaagtgaaaagataaaactggagtttgagacatatcttcggagggcgatgaaacgtttcaataaaggggtccatgaggacacacacaaggttcaccttctctgcctgctagcaaatggcttctatcgaaataacatctgcagccagccagatctgcatgctattggcctgtccatcatcccagcccgctttaccagagtgctgcctcgagatgtggacacctactacctctcaaacctggtgaagtggttcattggaacatttacagttaatgcagaactttcagccagtgaacaagataacctgcagactacattggaaaggagatttgctatttactctgctcgagatgatgaggaattggtccatatattcttactgattctccgggctctgcagctcttgacccggctggtattgtctctacagccaattcctctgaagtcagcaacagcaaagggaaagaaaccttccaaggaaagattgactgcggatccaggaggctcctcagaaacttccagccaagttctagaaaaccacaccaaaccaaagaccagcaaaggaaccaaacaagaggaaacctttgctaagggcacctgcaggccaagtgccaaagggaagaggaacaagggaggcagaaagaaacggagcaagccctcctccagcgaggaagatgagggcccaggagacaagcaggagaaggcaacccagcgacgtccgcatggccgggagcggcgggtggcctccagggtgtcttataaagaggagagtgggagtgatgaggctggcagcggctctgattttgagctctccagtggagaagcctctgatccctctgatgaggattccgaacctggccctccaaagcagaggaaagcccccgctcctcagaggacaaaggctgggtccaagagtgcctccaggacccatcgtgggagccatcgtaaggacccaagcttgccagcggcatcctcaagctcttcaagcagtaaaagaggcaagaaaatgtgcagcgatggtgagaaggcagaaaaaagaagcatagctggtatagaccagtggctagaggtgttctgtgagcaggaggaaaagtgggtatgtgtagactgtgtgcacggtgtggtgggccagcctctgacctgttacaagtacgccaccaagcccatgacctatgtggtgggcattgacagtgacggctgggtccgagatgtcacacagaggtacgacccagtctggatgacagtgacccgcaagtgccgggttgatgctgagtggtgggccgagaccttgagaccataccagagcccatttatggacagggagaagaaagaagacttggagtttcaggcaaaacacatggaccagcctttgcccactgccattggcttatataagaaccaccctctgtatgccctgaagcggcatctcctgaaatatgaggccatctatcccgagacagctgccatccttgggtattgtcgtggagaagcggtctactccagggattgtgtgcacactctgcattccagggacacgtggctgaagaaagcaagagtggtgaggcttggagaagtaccctacaagatggtgaaaggcttttctaaccgtgctcggaaagcccgacttgctgagccccagctgcgggaagaaaatgacctgggcctgtttggctactggcagacagaggagtatcagcccccagtggccgtggacgggaaggtgccccggaacgagtttgggaatgtgtacctcttcctgcccagcatgatgcctattggctgtgtccagctgaacctgcccaatctacaccgcgtggcccgcaagctggacatcgactgtgtccaggccatcactggctttgatttccatggcggctactcccatcccgtgactgatggatacatcgtctgcgaggaattcaaagacgtgctcctgactgcctgggaaaatgagcaggcagtcattgaaaggaaggagaaggagaaaaaggagaagcgggctctagggaactggaagttgctggccaaaggtctgctcatcagggagaggctgaagcgtcgctacgggcccaagagtgaggcagcagctccccacacagatgcaggaggtggactctcttctgatgaagaggaggggaccagctctcaagcagaagcggccaggatactggctgcctcctggcctcaaaaccgagaagatgaagaaaagcagaagctgaagggtgggcccaagaagaccaaaagggaaaagaaagcagcagcttcccacctgttcccatttgagaagctgtgagctgagcgcccactagaggggcacccaccagttgctgctgccccactacaggccccacacctgccctgggcatgcccagcccctggtggtgggggcttctctgctgagaaggcaaactgaggcagcatgcacggaggcggggtcaggggagacgaggccaagctgaggaggtgctgcaggtcccgtctggctccagcccttgtcagattcacccagggtgaagccttcaaagctttttgctaccaaagcccactcaccctttgagctacagaacactttgctaggagatactcttctgcctcctagacctgttctttccatctttagaaacatcagtttttgtatggaagccaccgggagatttctggatggtggtgcatccgtgaatgcgctgatcgtttcttccagttagagtcttcatctgtccgacaagttcactcgcctcggttgcggacctaggaccatttctctgcaggccacttaccttcccctgagtcaggcttactaatgctgccctcactgcctctttgcagtaggggagagagcagagaagtacaggtcatctgctgggatctagttttccaagtaacattttgtggtgacagaagcctaaaaaaagctaaaatcaggaaagaaaaggaaaaatacgaattgaaaattaaggaaatgttagtaaaatagatcagtgttaaactagattgtattcattactagataaaatgtataaagctctctgtactaaggagaaatgacttttataacattttgagaaaataataaagcatttatctaaaaaaaaaaaaaaaaaaaaaaaaaaaaa

SEQ ID NO: 2444 - DNA, 4830 bp, Homo sapiens
caaccggttccgagtttgaggcactaggaggagggggagaagcggctgcagcggccgcggcaggagcagcgggagctacagcatcagcaagagcaacagtagctacagccccggcggcggtgcctgttccagtctttgctgctgcagtccgtgcaaccacccagagggggaggggggaaccaccagtcgctgaggaacaagagaaggggggaaagtttaggcgagccttgggggggggggggccagcgccggagccgcgtgagagagggagccgtgttttggtaggggggagtcggactgcaactggcagcagagcgtctccccggccgtgtggactctacaccccctactcctgccgcttctgctgctgcctgtggctggagggtccccctggggctgaatctttgggacttgaccccgttccctcccccttccctcactccccagccgggcgggagcatttattccccagattaattccccttttgggggggggcgggtgtgtgtgtgtgtgtgtgtgtgtgtgtgtgttgggggaagcgtccctgaaatagtaaatattattgagctctttttgcccttttcctgtccgtttttttaatttccttttttgaggtgggaaaactgaaacccaccttgattcgtcccctctcccccctccccaccttccctcgccctaatcccccaacgaggaaggaaggagcagttggttcaatctctggtaatctatgccagcaattatgacaatgttagcagaccatgcagctcgtcagctgcttgatttcagccaaaaactggatatcaacttattagataatgtggtgaattgcttataccatggagaaggagcccagcaaagaatggctcaagaagtactgacacatttaaaggagcatcctgatgcttggacaagagtcgacacaattttggaattttctcagaatatgaatacgaaatactatggactacaaattttggaaaatgtgataaaaacaaggtggaagattcttccaaggaaccagtgcgaaggaataaaaaaatacgttgttggcctcattatcaagacgtcatctgacccaacttgtgtagagaaagaaaaggtgtatatcggaaaattaaatatgatccttgttcagatactgaaacaagaatggcccaaacattggccaacttttatcagtgatattgttggagcaagtaggaccagcgaaagtctctgtcaaaataatatggtgattcttaaactcttgagtgaagaagtatttgatttctctagtggacagataacccaagtcaaatctaagcatttaaaagacagcatgtgcaatgaattctcacagatatttcaactgtgtcagtttgtaatggaaaattctcaaaatgctccacttgtacatgcaaccttggaaacattgctcagatttctgaactggattcccctgggatatatttttgagaccaaattaatcagcacattgatttataagttcctgaatgttccaatgtttcgaaatgtctctctgaagtgcctcactgagattgctggtgtgagtgtaagccaatatgaagaacaatttgtaacactatttactctgacaatgatgcaactaaagcagatgcttcctttaaataccaatattcgacttgcgtactcaaatggaaaagatgatgaacagaacttcattcaaaatctcagtttgtttctctgcacctttcttaaggaacatgatcaacttatagaaaaaagattaaatctcagggaaactcttatggaggcccttcattatatgttgttggtatctgaagtagaagaaactgaaatctttaaaatttgtcttgaatactggaatcatttggctgctgaactctatagagagagtccattctctacatctgcctctccgttgctttctggaagtcaacattttgatgttcctcccaggagacagctatatttgcccatgttattcaaggtccgtttattaatggttagtcgaatggctaaaccagaggaagtattggttgtagagaatgatcaaggagaagttgtgagagaattcatgaaggatacagattccataaatttgtataagaatatgagggaaacattggtttatcttactcatctggattatgtagatacagaaagaataatgacagagaagcttcacaatcaagtgaatggtacagagtggtcatggaaaaatttgaatacattgtgttgggcaataggctccattagtggagcaatgcatgaagaggacgaaaaacgatttcttgttactgttataaaggatctattaggattatgtgaacagaaaagaggcaaagataataaagctattattgcatcaaatatcatgtacatagtaggtcaatacccacgttttttgagagctcactggaaatttctgaagactgtagttaacaagctgttcgaattcatgcatgagacccatgatggagtccaggatatggcttgtgatactttcattaaaatagcccaaaaatgccgcaggcatttcgttcaggttcaggttggagaagtgatgccatttattgatgaaattttgaacaacattaacactattatttgtgatcttcagcctcaacaggttcatacgttttatgaagctgtggggtacatgattggtgcacaaacagatcaaacagtacaagaacacttgatagaaaagtacatgttactccctaatcaagtgtgggatagtataatccagcaggcaaccaaaaatgtggatatactgaaagatcctgaaacagtcaagcagcttggtagcattttgaaaacaaatgtgagagcctgcaaagctgttggacacccctttgtaattcagcttggaagaatttatttagatatgcttaatgtatacaagtgcctcagtgaaaatatttctgcagctatccaagctaatggtgaaatggttacaaagcaaccattgattagaagtatgcgaactgtaaaaagggaaactttaaagttaatatctggttgggtgagccgatccaatgatccacagatggtcgctgaaaattttgttccccctctgttggatgcagttctcattgattatcagagaaatgtcccagctgctagagaaccagaagtgcttagtactatggccataattgtcaacaagttagggggacatataacagctgaaatacctcaaatatttgatgctgtttttgaatgcacattgaatatgataaataaggactttgaagaatatcctgaacatagaacgaactttttcttactacttcaggctgtcaattctcattgtttcccagcattccttgctattccacctacacagtttaaacttgttttggattccatcatttgggctttcaaacatactatgaggaatgtcgcagatacgggcttacagatactttttacactcttacaaaatgttgcacaagaagaagctgcagctcagagtttttatcaaacttatttttgtgatattctccagcatatcttttctgttgtgacagacacttcacatactgctggtttaacaatgcatgcatcaattcttgcatatatgtttaatttggttgaagaaggaaaaataagtacatcattaaatcctggaaatccagttaacaaccaaatctttcttcaggaatatgtggctaatctccttaagtcggccttccctcacctacaagatgctcaagtaaagctctttgtgacagggcttttcagcttaaatcaagatattcctgctttcaaggaacatttaagagatttcctagttcaaataaaggaatttgcaggtgaagacacttctgatttgtttttggaagagagagaaatagccctacggcaggctgatgaagagaaacataaacgtcaaatgtctgtccctggcatctttaatccacatgagattccagaagaaatgtgtgattaaaatccaaattcatgctgttttttttctctgcaactcgttagcagaggaaaacagcatgtgggtatttgtcgaccaaaatgatgccaatttgtaaattaaaatgtcacctagtggccctttttcttatgtgtttttttgtataagaaattttctgtgaaatatccttccattgtttaagcttttgttttggtcatctttatttagtttgcatgaagttgaaaattaaggcatttttaaaaattttacttcatgcccatttttgtggctgggctggggggaggaggcaaattcgatttgaacatatacttgtaattctaatgcaaaattatacaatttttcctgtaaacaataccaatttttaattagggagcattttccttctagtctatttcagcctagaagaaaagataatgagtaaaacaaattgcgttgtttaaaggattatagtgctgcattgtctgaagttagcacctcttggactgaatcgtttgtctagactacatgtattacaaagtctctttggcaagattgcagcaagatcatgtgcatatcatcccattgtaaagcgacttcaaaaatatgggaacacagttagttatttttacacagttctttttgtttttgtgtgtgtgtgctgtcgcttgtcgacaacagctttttgttttcctcaatgaggagtgttgctcatttgtgagccttcattaactcgaagtgaaatggttaaaaatatttatcctgttagaataggctgcatctttttaacaactcattaaaaaacaaaacaactctggcttttgagatgacttatactaatttacattgtttaccaagctgtagtgctttaagaacactacttaaaaagcaaaataaacttggtttacattta

SEQ ID NO: 2445 - DNA, 5231 bp, Homo sapiens
agctgtcgtgcctcgtggtcccgggactgcagtggtgtgcgctctcggcgcgtggcgctaggcatggcgatggatcaagtaaacgcgctgtgcgagcagctggtgaaagcggtgacggtcatgatggaccccaactccacccagcgctaccggctggaagccctcaagttttgtgaggagtttaaagaaaagtgtcctatctgtgtcccctgtggcttgaggttggctgagaaaacacaagttgccatcgtcagacattttggccttcagatcctggaacacgttgtcaagtttcggtggaacggcatgtctcgattggagaaggtgtatctgaagaacagtgtcatggagctgattgcaaatggaacattgaacattttggaagaggagaaccatattaaagatgctctgtctcgaattgtagtggaaatgatcaagcgagagtggccacagcattggcctgacatgctaatagaattggacactctttccaaacaaggggaaacacagacagaattggtgatgtttatccttttgcgactggcagaggatgtagtgacttttcagacacttccccctcaaagaagaagggacatccagcaaacattaacccagaacatggaaaggatcttcagttttctgcttaacacacttcaagaaaatgtaaacaagtatcagcaagtgaagacagatacttctcaggagtcaaaggcgcaagcaaactgtcgagtaggagttgcagcactgaatactctagcaggctatattgactgggtgtctatgagtcacatcactgctgaaaactgtaaactcctggagatactgtgtttgctgttgaatgaacaggaacttcagttgggagccgctgagtgtcttctcattgcagtcagcagaaaaggcaagttggaagaccggaagcccttgatggtcttatttggagatgttgccatgcattatatactctccgccgcacagactgctgatggaggaggtttggtagaaaaacactacgtctttctgaagaggctctgtcaggtgttgtgtgcgctgggcaatcagctgtgtgcattgctgggtgcagattctgatgtagaaacaccatcaaactttggaaaatacctggaatcttttcttgctttcacaacccatccaagtcagtttctacgctcttcaactcagatgacttggggagccctcttcaggcatgaaatcctgtcccgtgatcctttgctattagcaataataccaaaatatcttcgtgcttccatgactaacttggtcaagatgggctttccttctaaaacagacagccctagctgtgaatattctcggtttgattttgatagcgatgaggacttcaatgctttcttcaactcctcccgagcacaacaaggagaggtgatgaggttggcatgtcgtttggatcccaaaactagcttccagatggctggggagtggctaaagtatcaactatcaacttttcttgatgctggttctgtgaattcttgttctgcagttggaactggagaaggaagcctctgttccgtcttctcaccttcattcgtgcagtgggaagccatgactctttttttggaaagtgttatcacccagatgtttcgaacactaaatagagaagaaattcctgttaatgatggaatagagctattgcagatggttctgaactttgataccaaggatcccctcatcctgtcctgcgtccttactaatgtctctgcactctttccatttgtcacctacagaccagagttcctgccccaggtcttctctaagctattttcatctgtcacttttgaaactgttgaagaaagtaaggcccccagaacccgggcagtgaggaatgtgaggaggcatgcttgttcctccatcatcaagatgtgtcgtgactacccccagcttgtgctgcccaattttgacatgctttataaccatgtgaagcaactcctctccaatgagctactcctgacacaaatggagaagtgtgccctcatggaagccctggttctcattagcaaccaatttaagaactacgagcgtcagaaggtgttcctagaggagctgatggcaccagtggccagcatctggctttctcaagacatgcacagagtgctgtcagatgttgatgctttcattgcgtatgtgggtacagatcagaagagctgtgacccaggcctggaggatccgtgtggcttaaaccgtgcacgaatgagcttttgtgtatacagcattctgggtgtggtgaaacgaacttgctggcccactgacctagaagaggccaaagctgggggatttgtggtgggttatacatccagtggaaatccaatcttccgtaacccctgcacagagcagattctgaaacttcttgacaatttgcttgcgcttataagaacccacaatacattatatgcaccagaaatgctagccaaaatggcagagcctttcaccaaggctctggatatgcttgacgcggaaaaatctgctatattaggattacctcaacctctcttggaactcaatgactctcctgtcttcaaaaccgtcttggaaagaatgcagcgtttcttctctaccctctatgaaaactgttttcatatcctagggaaggcaggcccttccatgcagcaagacttctatactgtggaggaccttgctacccagcttctcagctcagcctttgtcaacttgaacaatattcctgactaccgactcagacccatgcttcgtgtctttgtaaagcctctggtgctcttctgtcccccagagcactatgaagccctggtatcccccatcctcggacctcttttcacctacctccatatgaggctttctcagaaatggcaagttatcaaccaaaggagcctgctgtgtggagaagatgaggctgcagatgaaaacccagagtctcaagagatgctggaggagcaactggtgaggatgttaacccgagaagtcatggacctaatcacggtttgctgtgtttcaaagaagggtgctgaccacagtagtgctcccccagcagatggagacgatgaagaaatgatggccacagaggtcaccccctcagctatggcagagcttacagacctgggcaaatgtctgatgaagcatgaggatgtttgtacagcgctattaattacagccttcaattccctggcctggaaagatactctgtcctgccagaggacaacctcacagctctgctggcctctcctcaaacaagtgctgtcagggacactgctcgcagatgcagttacgtggcttttcaccagtgtgctgaaaggcttacagatgcacgggcagcacgacgggtgcatggcttccctggtccatctggccttccagatatatgaggcactgcgccccaggtacctggagataagagctgtaatggagcaaatccctgaaatacagaaggactcactggaccagtttgactgcaagcttttaaacccctccctgcagaaagtggctgacaagcgccgaaaggaccaattcaaacgcctcattgctggttgcattgggaaacccttgggagagcagttccgaaaagaagttcacattaagaatcttccctcacttttcaaaaaaacaaagccaatgctggagacggaggtgctggacaatgatgggggtggcctggccaccatctttgaaccctgaatcaagcttttgggcatccttcctcggcctttcttgtcatctcttctttccctttgtagccgatctctaggcccttcttgcactgccacctcactttccaccactgtcagcctggaaagagatccaggtctggagctggagagaacaggccctgtgcaggaccagaagtaattatactaaagtatcaagaaagggagttagggcttaaactattctgtctagatgtcccagatagttcccattctacttggagatttggcttttccaagaaaagctagagcagagcagcccttctcccacaagccctcccacccccgtgcagccacatacctgtacagaatggtaactaagggtgctgtgcccaaccctgcgactagcaaggctcgcagcaagagcacagccctcaactacttgtgccagagtttctcttggaccactccaactcccactgagcccttttgctgctgggctggcaggaaactttccccactccctaaggggcatgtctgggttaggtgctaagtgctgaagagaacttggtcagttctctcaactttgctttgggcaagaatctggtcacctgatgggatccatggtacaggctactgctaaacttggcacagtatcaagtatagtacctccaaggaccagggctgggaagtctttagtgctaacatcccctttagagttcacacatcttgcccttccatgaatgacccctcagtctggcctccccagcctcaaggtccactcaggcacaagagccacagtaccctagatagtgtcacatgacaccgttgtcatccaaggataatacagaccaactaggctacatctgtgatgagcagctagcaaagccgctggtcttctcctaggactaagtccaggtgccttccacaatctcatggtctttcaggtccctggttacttttctcaaaggccatttccaaaagaatacatgccttcacatcacaacctgtactgtgagtccattctagaggtcactgaaaggccctgtaaagagaggacatggatacgggacctggccctgaggttattactggccgtaaggcagagttaatccatacagaaaccagtgtgtccatgtgctctgcacaaaaacagacctgttgtccatccagtccactgacaagagggtttccccgagagccgaagtggactgaagctacagtttttagctggtgcgggccacaggcagggtcagattgagaagaagcaaagctggggaagcagaagttgggagtcttgtgttgctccctcttcctgtgtggtgctctgggtttctgtggatcgtgaaggcgatctcaagagtgtttccctccaaacctgatagctgcctattcctgtctggttggggctgtggaggatgtagttgtatttattgcattgtaatatttttaacatcctgtgacttcatgctagaaattttctattgtttatagaaactttttgtagaaacattaactctaaagcacatctgcatgtcagtaaaaatctcagtttcgtacagaaaaaaaaaaaaaaaaaaaaaa

SEQ ID NO: 2446 - DNA, 4880 bp, Homo sapiens
aggcgcagcggcgacggcgtcggcggcggcggcggcagcggctccggccgaggtgcgcgctgggggggagggggggccggagaggagcatgaatggagcaaaatggcggatcatgtgcagagcctggcccaactagagaatctgtgcaaacagctgtatgaaaccacagacacaaccactcgactccaggcagagaaagccttggttgaatttaccaacagccctgattgcctgagcaagtgccagctactcctcgaaagaggaagttcctcttactcccagttactggcagctacatgccttaccaagcttgtatcacgcacaaacaaccccctaccattggaacagcgaatagatattcggaactatgtgctcaactaccttgccactcggccgaagttggctactttcgtgacacaagcacttattcagttatatgccagaatcacaaaactgggctggtttgactgtcagaaggatgactatgtcttcagaaatgcaatcacagacgtcacaaggtttttacaggatagtgttgaatactgcatcattggtgtcacaattttatctcagctaaccaatgaaattaatcaagcagacaccacccatcctttaaccaagcacagaaaaatagcctcttcttttcgcgattcatcattatttgatatcttcacactttcctgcaatttactaaaacaggcttcaggaaagaatctaaacttgaatgatgaaagtcagcatggcttgctcatgcaactgctcaagctcactcataactgcctcaactttgacttcatcggcacttccactgatgagtcctcagacgacctgtgtacagtgcagattcccaccagctggagatcagccttcttagattcttcaaccttgcagctgttttttgacctgtatcattccatccctccttcattttcacctctggtattatcctgcttggtacagatcgcttcagtcagaagatccctgtttaacaatgcagagagggccaagtttctctctcatcttgttgatggtgttaaacgaatactggaaaacccacagagtttatcagacccaaacaattaccatgagttttgcagactactggcccgattgaagagtaactatcaactgggagaattggtaaaggtggaaaactaccctgaggtcatccgattgatagccaacttcacagtgaccagcctacagcactgggaatttgctccaaatagtgtgcactatcttctgagcctgtggcagcggctggcagcctctgtgccgtatgtcaaagccacagagccccacatgctggaaacttacactcctgaggtcaccaaagcctacatcacatcccggttggaatctgtgcacatcatactgagagatggcctggaagatcccctggaggatacggggctggtccagcagcagttggaccagctgtccaccattgggcgttgtgaatatgagaagacgtgtgcactcctcgtgcagttgtttgaccagtcggcccagtcgtaccaggagctgctacagagcgccagcgcaagcccaatggacattgcagtgcaggagggaaggctgacatggctggtttacattattggagcagtgatcggtggccgggtttcttttgccagcactgatgagcaagacgccatggatggtgagcttgtctgtcgggtgctccagctgatgaacctaacagattctcgtttggcccaggcgggtaatgagaagctagagttggccatgctgagcttttttgaacagtttcgtaagatctacattggggaccaagtgcagaaatcctctaagctgtaccgccgactctcagaagttctgggcttgaatgatgagaccatggtcctaagcgtcttcataggaaaaatcatcaccaacttgaagtactggggccgttgtgaaccaatcacctccaagacactacagcttctcaatgacctgtccattgggtacagtagcgtaaggaagctagtgaagcttagtgcggtacagttcatgctgaacaatcacacgagcgagcacttttcatttttgggtattaacaatcagtccaacctgacagacatgcggtgtcggactaccttctacacagcacttgggcgtctcctcatggtggatttaggagaggatgaagatcagtatgagcagttcatgctgccactcacagcagcatttgaggctgtggcccagatgtttagcaccaatagtttcaacgagcaggaggcaaagcgaactctagttggcctagtaagagacctgagagggatcgctttcgctttcaatgccaagaccagcttcatgatgctctttgaatggatatatccatcctatatgccaattctccaacgggcaattgagctctggtaccatgatccagcctgtactacacctgtactcaagttgatggctgaattggttcataataggtcccagcgactccagtttgatgtctcttcccccaatggcatcttactcttccgagaaaccagcaagatgataacaatgtatggcaatcgcatcctgacactaggagaggtcccaaaggatcaggtctatgctctgaagctcaagggcatctccatctgcttctccatgctgaaggctgctctcagtgggagttacgtcaatttcggagtctttcgtctctatggagacgatgccctggacaatgctctgcagaccttcatcaagctgctcctctctattcctcacagtgatctcttggattaccccaagctcagccagtcttattattcactactggaagtcctgacccaggaccatatgaactttattgcaagcctggaacctcacgtcatcatgtatattctctcttccatttctgaaggacttactgcacttgacaccatggtatgcacaggctgctgctcctgcctggaccacattgtgacatacctcttcaagcagctgtcacgtagcaccaagaagaggaccacacccctgaaccaggagagcgaccgctttctgcacatcatgcagcagcatccagagatgatccagcagatgctgtccacggtgctgaacatcatcatctttgaagactgtaggaaccagtggtctatgtcccgaccactacttggcttgatattgcttaatgaaaagtatttttctgacctaagaaacagtattgtgaacagccagccaccggagaagcagcaggccatgcacctgtgttttgagaacctgatggaaggcatcgagcgaaatcttcttacgaaaaacagagacaggttcacccagaacctgtcagcattccgtcgagaagtcaacgactcaatgaagaattccacttatggcgtgaatagcaatgacatgatgagctgacacctccttggactctacctgtacagagcagcgtccctttggtttggcccagaggggcgaacaattgcaagggagagggcctggctgatcctggctcttttctccaggggtgtggggaaaatggcaaaggtcaactagctgcttccccagggaataggggtgtgagtacactcactagggggcagggcgctgctggttcctgggggactgggtgggaagggtggtgggaggagataagagatacaaactgagactccagcctctcctcctggggccacccaagtggggagaacccctagtgtcctgccacaacctgccttgtataaacatgtacattttttcataacattttgaacaaggtttatattgactcaagtttaaaaacaaaaagtgtgactgaaaaatttttacagagtctagtgcaccaatgctgatgtgaggggttgtgtatgcgagtgaagaaaatgtgtattctggtggcctgaagctttactggacaaggatgtgtgagagtgcagagatatatttagtgacacagtagagaggcaaaaaaaaagctaaaattccaaatgtatattttttcgtattgccctgtcctcacccagaaatgatcaattcctgttactgtattaacccttgttattaggaactctaagccatgccagaacaccgtccctccccttggaccgtgtagattctgccctgggtccctagccccttgcagtgataaataactccagctaaaagtgtttggtgttcttatctccaccctctttcctactttgcttaccctcatcctcagacagatgcctcttgcttttaaaagttggatttaacgacgtgttgtagggttcttggtctgtgtgaaggcagagaccagagagaaggaagtgagcccactgctctcctgggagcaatgtgggtgagtccaccagaggccctgctgtgtgtggccaataaattttagtcttccccagccctcgaggcagtgtgtgtggatgtatgcgtgtggatatttatatatgtaccctgcactcatgaatgtatgaactggaggaagttactacagtggaagggttcttaataacaaggtctacctagcatgaagtatttaacattctcccatcccttaaaaaatatacatttttataaaatgaaaaccataataaatgttttgaatattaaaaaaaataataacctacagaggaaaattaatggagacagctatttgccttgtactttttccacaattgttgctgctagttgtacacatctctagttcagctcttgcccacgggacactcatcaattaggttttatttttatttctttcctctacccccagaaacaagcctgttaattttttttccttctcctctggcgactgtgtgatgaatcctttcttgcgtgatcaggttgcggatagacttgtaagggtgtttgctgcatacagtgtaagcattgtgaccgccaataaacttcaatggtttctactgaaaaaaaaaaaaaaaaaa

SEQ ID NO: 2447 - DNA, 4685 bp, Homo sapiens
ggaggaggtggagagtgaggccgaggcgtggggagcccgggaactccctcctcctgaagtaacgcgtcccgggccggctctgccgtcgttgctgccgccgggcgccccgggacgaggaggtggaggagggagagggcccgcgggcctcgcctccgccctccgccacctcgagctgcggtagcagcgactcatgagagcgcggccggaggacagatttgataatgggctgcattaaaagtaaagaaaacaaaagtccagccattaaatacagacctgaaaatactccagagcctgtcagtacaagtgtgagccattatggagcagaacccactacagtgtcaccatgtccgtcatcttcagcaaagggaacagcagttaatttcagcagtctttccatgacaccatttggaggatcctcaggggtaacgccttttggaggtgcatcttcctcattttcagtggtgccaagttcatatcctgctggtttaacaggtggtgttactatatttgtggccttatatgattatgaagctagaactacagaagacctttcatttaagaagggtgaaagatttcaaataattaacaatacggaaggagattggtgggaagcaagatcaatcgctacaggaaagaatggttatatcccgagcaattatgtagcgcctgcagattccattcaggcagaagaatggtattttggcaaaatggggagaaaagatgctgaaagattacttttgaatcctggaaatcaacgaggtattttcttagtaagagagagtgaaacaactaaaggtgcttattccctttctattcgtgattgggatgagataaggggtgacaatgtgaaacactacaaaattaggaaacttgacaatggtggatactatatcacaaccagagcacaatttgatactctgcagaaattggtgaaacactacacagaacatgctgatggtttatgccacaagttgacaactgtgtgtccaactgtgaaacctcagactcaaggtctagcaaaagatgcttgggaaatccctcgagaatctttgcgactagaggttaaactaggacaaggatgtttcggcgaagtgtggatgggaacatggaatggaaccacgaaagtagcaatcaaaacactaaaaccaggtacaatgatgccagaagctttccttcaagaagctcagataatgaaaaaattaagacatgataaacttgttccactatatgctgttgtttctgaagaaccaatttacattgtcactgaatttatgtcaaaaggaagcttattagatttccttaaggaaggagatggaaagtatttgaagcttccacagctggttgatatggctgctcagattgctgatggtatggcatatattgaaagaatgaactatattcaccgagatcttcgggctgctaatattcttgtaggagaaaatcttgtgtgcaaaatagcagactttggtttagcaaggttaattgaagacaatgaatacacagcaagacaaggtgcaaaatttccaatcaaatggacagctcctgaagctgcactgtatggtcggtttacaataaagtctgatgtctggtcatttggaattctgcaaacagaactagtaacaaagggccgagtgccatatccaggtatggtgaaccgtgaagtactagaacaagtggagcgaggatacaggatgccgtgccctcagggctgtccagaatccctccatgaattgatgaatctgtgttggaagaaggaccctgatgaaagaccaacatttgaatatattcagtccttcttggaagactacttcactgctacagagccacagtaccagccaggagaaaatttataattcaagtagcctattttatatgcacaaatctgccaaaatataaagaacttgtgtagattttctacaggaatcaaaagaagaaaatcttctttactctgcatgtttttaatggtaaactggaatcccagatatggttgcacaaaaccacttttttttccccaagtattaaactctaatgtaccaatgatgaatttatcagcgtatttcagggtccaaacaaaatagagctaagatactgatgacagtgtgggtgacagcatggtaatgaaggacagtgaggctcctgcttatttataaatcatttcctttctttttttccccaaagtcagaattgctcaaagaaaattatttattgttacagataaaacttgagagataaaaagctataccataataaaatctaaaattaaggaatatcatgggaccaaataattccattccagttttttaaagtttcttgcatttattattctcaaaagttttttctaagttaaacagtcagtatgcaatcttaatatatgctttcttttgcatggacatgggccaggtttttcaaaaggaatataaacaggatctcaaacttgattaaatgttagaccacagaagtggaatttgaaagtataatgcagtacattaatattcatgttcatggaactgaaagaataagaactttttcacttcagtccttttctgaagagtttgacttagaataatgaaggtaactagaaagtgagttaatcttgtatgaggttgcattgattttttaaggcaatatataattgaaactactgtccaatcaaaggggaaatgttttgatctttagatagcatgcaaagtaagacccagcattttaaaagccctttttaaaaactagacttcgtactgtgagtattgcttatatgtccttatggggatgggtgccacaaatagaaaatatgaccagatcagggacttgaatgcacttttgctcatggtgaatatagatgaacagagaggaaaatgtatttaaaagaaatacgagaaaagaaagtgaaagttttacaagttagagggatggaaggtaatgtttaatgttgatgtcatggagtgacagaatggctttgctggcactcagagctcctcacttagctatattctgagactttgaagagttataaagtataactataaaactaatttttcttacacactaaatgggtatttgttcaaaataatgaagttatggcttcacattcattgcagtgggatatggtttttatgtaaaacatttttagaactccagttttcaaatcatgtttgaatctacattcacttttttttgttttcttttttgagacggagtctcgctctgtcgcccaggctggagtgcagtggcgcgatctcggctcactgcaagctctgcctcccaggttcacaccattctcctgcctcagcctcccgagtagctgggactacaggtgcccaccaccacgcctggctagttttttgtatttttagtagagacgcagtttcaccgtgttagccaggatggtctcgatctcctgaccttgtgatctgcccgcctcggcctcccaaagtgctgggattacaggcgtgagccaccgcgcccagcctacattcacttctaaagtctatgtaatggtggtcattttttcccttttagaatacattaaatggttgatttggggaggaaaacttattctgaatattaacggtggtgaaaaggggacagtttttaccctaaagtgcaaaagtgaaacatacaaaataagactaatttttaagagtaactcagtaatttcaaaatacagatttgaatagcagcattagtggtttgagtgtctagcaaaggaaaaattgatgaataaaatgaaggtctggtgtatatgttttaaaatactctcatatagtcacactttaaattaagccttatattaggcccctctattttcaggatataattcttaactatcattatttacctgattttaatcatcagattcgaaattctgtgccatggcatatatgttcaaattcaaaccatttttaaaatgtgaagatggacttcatgcaagttggcagtggttctggtactaaaaattgtggttgttttttctgtttacgtaacctgcttagtattgacactctctaccaagagggtcttcctaagaagagtgctgtcattatttcctcttatcaacaacttgtgacatgagattttttaagggctttatgtgaactatgatattgtaatttttctaagcatattcaaaagggtgacaaaattacgtttatgtactaaatctaatcaggaaagtaaggcaggaaaagttgatggtattcattaggttttaactgaatggagcagttccttatataataacaattgtatagtagggataaaacactaacttaatgtgtattcattttaaattgttctgtatttttaaattgccaagaaaaacaactttgtaaatttggagatattttccaacagcttttcgtcttcagtgtcttaatgtggaagttaacccttaccaaaaaaggaagttggcaaaaacagccttctagcacacttttttaaatgaataatggtagcctaaacttaatatttttataaagtattgtaatattgttttgtggataattgaaataaaaagttctcattgaatgcacctattaatcgttttagttgctattcatattctcattcgttttttaaaaactgatatattctgaatttattcttccattgagaaaaaaatgttcagttacttgtaactactgagcagaatttaatcaatcctttattaaattcagaacattattgaa

SEQ ID NO: 2448 - DNA, 2183 bp, Homo sapiens
ccagggcctgactaaacctggagactcgggtggccgaggggcttcataccagctgaagagcgacaagccgctggcagccgcggatctcaccgccgctcagggtttttagaacttcagccataaaaatgggcagaattttccttgatcatatcggtggtacccgtctgttttcttgtgcaaactgtgatacgatcctgaccaaccgctcagaactcatctccactcgtttcacaggcgccactggcagagcatttctttttaacaaggtagttaacctgcagtacagcgaagttcaagatcgggtcatgctcactggccgccacatggttcgagatgtgagctgcaaaaactgcaatagcaaactgggatggatctatgagtttgccactgaagacagccagcgatataaggaaggccgcgtgatcctggaacgtgctctagttcgagagagtgagggctttgaggagcatgtaccatctgataactcttgaagatacagagagaaatccatcttttcccaggtctccttcactgaaaacaaaaatctacttacatacactgtcaccttagcatcagagtcggattaatgaactgcggaacaagaggttgtgagaatctaagatggaacctttctttctttctttctttttttttaaattttgtattttccatccaacagcagtgtgtagagagaatattatgcagatgccgttaattttttaccctatgtttacatcttgaggcagcagagtctgtctgcagctatgtggtgagctatgtaaggaaaaaaatctgggctgttagagtgaaaaagtgtgttttatgtcaattgtgaaaggaaaatgttaggagtatggtttttaaacttgggcttcattttaaacttttttttttaaacccagttatttcacttgatttgctagcttcagagaagagatccgaatctgtgcccagcgctaaaggctcagtgttagcatggcttgtgctggccggtgtgccatattcttgttggagatgaaccgtagcaccagagcccattcttccttgtcagtcttggcccaaagatgtcaccattcctagttatttgtcaccacataattggtgttgattggaaactttttctgagatgggacagaactgctgggttgtctttttccatgtaacttaagcatagtaatataaataaagtaatagttggatgcttttggtcctgtgttgcttttaaaaacaccttataaaagaggagagtatttgataagcaattttcatagtagtaaagttttttttcatctcttaaactaaattgaccatgcatataatattctttgtttaaatgaaagcatactgttgaaacccgcagtgttgcatttagaaaacagttgaacagaatgtcaatgtgcattcatgcaaaaaaacatttaatctgcatctgttttagaaaagggggaaatgaagcaacttgtctaaaaatactgctttacaaagcatttcagcctttccccctcagttttgcattgattttttgacaagtctgtagagcctaatagtttccatcaaaggcctagatctcttatttagcatttttttcagctcttctctcagaagttcagctgttgaaacgaaaactgtactttgtaccctcacatacaaagggatcaaatttgacctggtgttattttagccccaaatttatgacattacacaatattaaaatgtaaatgtttctttacccaaactacttctagatattctagtatttgcttctggtggaattaaatgacggtaaaattggctaattatttgaatgaatgaatggatggatgttttgcatgctcaatttctaggtcctttgtctagaaaggaaatttgcctcagttgaattagtgaaatatttctgtcgttgatattaaaagtgacttctgagtacagttaagttcctcctatttgccactgggctgttggttagaagcataggtaactgattaagtaggtatgatactgcatttgaaataagtggacacaaactatcctttctccaccatggactcaatctgagaacaacagcattcatttccattcatttccatactggcttttgattatatgcagattcctagtagcatgccttacctacagcactatgtgcatttgctgtcacaataaagtatattttgtcttgcaaa

SEQ ID NO: 2449 - DNA, 6195 bp, Homo sapiens
gtaaacagcgcagggcatttcgggagcgggattgtttcgcgcaggaagcaggctccattttagcgccgcccgccgtcgccatctgtttcccttccctcccccatacctagcccgagtctgagccctaacgagaaggctgggcctaggccgctggatgctggagtgaaaggaagggagaaagggaaaaagcgggaagagtcgagaaggctgagtgttaagaggccaagtgcgacgcgcgtatccgggcagacggactgacggacgggcccgtgcttctgccgcggctgcggcgcccgcgcgagtcgcgtctaagcggcggcggcggtggcagcggcggaaaccgaaggggagccatggcggctgacagtcgggaggagaaagatggagaacttaatgttctggatgatattttaactgaagtaccagaacaagatgatgaactgtataatccagagagtgaacaagataaaaatgagaaaaagggatcaaaaagaaaaagtgatcgaatggaatctactgataccaaacgacaaaagccttctgtccattcaagacaactggtttctaagccactgagctcatctgttagcaataacaaaagaatagttagtacaaaaggaaagtcagccacagagtataaaaatgaggaatatcaaagatctgaaagaaacaagcgtctagatgctgatcggaaaattcgtctatcaagtagtgcctccagagaaccttataagaatcaacctgaaaaaacctgtgtccggaaaagggatcctgaaaggagggccaaatctcctacgccagatggttctgagagaattgggcttgaagtggatagacgtgcaagcagatccagccagtcttctaaggaagaagtgaactctgaagaatatggctctgaccatgagactggcagcagtggttcttctgatgagcaagggaacaacactgagaatgaggaggaaggagtggaagaagatgtggaggaagatgaagaagtagaagaagatgcagaagaagatgaagaggtggatgaagatggagaggaggaggaggaagaggaggaggaggaagaggaggaggaggaggaggaagaagaagaatatgaacaggatgagagagaccagaaagaggagggaaatgattatgacactcgaagtgaggccagtgactctggttctgaatctgtttccttcacagatgggtctgtcagatctggttcaggcacagatggatcagatgagaaaaagaaggaaaggaagagagctagaggcatatctccaattgtttttgatagaagtggaagctctgcatcagagtcatatgcagatcaaaccagtaaactcaaatatgtgcttcaagatgcaagatttttcctcataaagagtaacaaccatgagaatgtgtctcttgccaaagcgaagggtgtatggtccacgctccctgtaaatgagaagaaattaaatcttgcatttagatctgcaaggagtgttatcttaatattttctgtcagagagagtggaaaatttcaagggtttgcaagactttcttcagaatcacatcacggaggatctcctatacactgggtgcttccagcaggaatgagtgctaaaatgctgggaggtgtctttaaaattgactggatttgcaggcgtgaattacccttcactaagtcggctcatctcaccaatccttggaatgaacataaaccagtaaagatcggacgtgatggacaggaaattgaacttgaatgtggaacccagctttgtcttctgtttccccccgatgaaagtattgacttgtatcaggtcattcataaaatgcgtcacaagagaagaatgcattctcagccccgatcacgaggacgtccatcccgtcgagaaccagtccgggatgtgggaaggcgtcgaccagaagattatgatattcataacagcagaaagaaaccaaggattgactatccccctgagtttcaccagagaccagggtatttaaaggatccacgataccaggaagtggacagacgattttcaggagttcgccgagatgtgtttttaaatgggtcctacaatgattatgtgagggaatttcataacatgggaccaccaccaccttggcaaggaatgcccccttacccaggaatggaacaacctccacaccatccttactatcagcaccatgctccacctcctcaagctcatcccccttactcaggacatcatccagtaccacatgaagcaagatacagagataaacgagtacatgattatgatatgagggtggatgatttccttcgtcgcacacaagctgttgtcagtggccggagaagtagaccccgtgaaagagaccgggaacgagagcgagaccgccctagagataacagacgagacagagagcgagatagaggacgtgatagagaaagagaaagagagcgattatgtgatcgagacagagaccgaggggagagaggtcgatatagaagataatgggcttttggaagcactgattgtttaaagatacaaaaaatcttgtattttttttttgtgtgtgtttacaagtagtaaatttattttcagctgtctgcctatgaagttcattgtgtagaaggatttattatgaccccctttgttccaagcatgcagtatcataagaactggaaaaactcaaatccgccaaaaatccacagctgacagttgaattgacacttttattggggcagaatggaacagtccaagaatgtagatactgattctttctccataaatgttcttatagtgtgttcatcctagagttatttttttgtttgtttttttcctttttggatcttgattgataactgccatgatattttgctttgatgtgtttctacatgtagttgcacacggttcagtaaaaataatgctgctatcgagtatgcaaatattgaagtatgatggtttgactgtatggcagtgttgtagcagcctcttgtttttttccccattgcctctttttttaaaaaacttataaagtcactttttatttttcctcagtcttcaatgacgagagcaatattaagaagacattgctatctaatttttaatctttttaaatgaaaaattcctatgttcagtagcgtggttgatgctattgtttagccttcccctccaaattgtatacattggcttggaatgttcacaacttgcgtgcgtggcagcggaagacgattcccatattctacattgctactgttttgtataaaataaattggtaaagattgacggttatcttttgtatctttttcttatccaattgcaggtttgttttattatgcaataatggacataaaagcatgctttttgttcaggaattttaggaaccccatttgctttttttgaggcacactttagcagaaatgattgacctaggcctgttgcattaaaagcttacttctatttctaacataagatacacagagttatgttaataatttggttaagtatttatacacctgataacattttgagtctactctgatcacagaatcgtttatttaggttttctatttgttgttttagtcttctgtaagtgaacgactttgtacatgctttctactttacttcataaatggacttttaaccctcttgtattagttctgtattttaagttaactgtccagttctcccagtggtaaccaactataacatagaaatagagccgctcaagaaaacagtttatgaaataatttttttgaattttttcttgagttacacctggagttttggcctttggaatttggcctttataaacattaggaatatttgaatgtttgatttttttatagtatcaacagttgtactgtgtaccagatcacatagtacagttttacatttaatctatattggcctgaaaagaacaacacaggcactttactcttaaaggatataataaactatagttatactgcattcatattcataccagcatgtagtatctttccctgcattcacagaagttttatttacaatgacaaaactaaagcctgaggatttgttttaaatctgcattgtggtagagaggaaaaagtacttttaaggaaacctgggttctagttttgtcattgtctttaattaaaccggttagtgatacatggtaagtcacttcattggcattttgtgtattcatcagtaagctagacaagatgatagctacagtttaagaatttctgtaaccattatacaaaactggtaggtaatattaaaggtattttcctgaaataataggaataaatactgagcactttgtatgcaatagagactttgtgcttttatatacagactcatttaaatgggctcagagaggctagtaaacttgcccaagattagaaaggtagtaattgatgggccaagattttacccatgtttttatttggtgtttctaaaccacctcatcacttttgaaaaaacagtatataaattaataaatgttttggagatggagtctgtcgcccaggtggagggcagtggcatgatcttggctcactgcaacctcctgcctcagcctcccgaatggctgggactacaggcacccaccaccacaccccgctaatttttgtaattttagtagagatggggttccaacatgttggccaggctggtctcaaactcgacctcaagtgacctcacctgcctcagcctcctaaagtgttgggattacaggcgtgagccactgcacctggcctgagatttttaaacattaacatttccttcaggcttaagcagaggatttttctaaagtgccatccaattagatgttaagttatgctttgtatgttgagcttagtattgagtcgatctattttaaaaagccaacattaagtttttaccaagtatctggcactattctaaacaattctgttggctcacataatcatcactgttttctcctttcctaatttttaaaataaacttaccggaacattgtataaaaaatgcaagatttttttctgtacagaagagtcagtatataaaaatcagtatgttttatttaatattcgtacacatgacagcttttgtcactgtgagaagacatggtttctttcgtgtactccactgtgctgtgattctaacaatctacattagtatgatgtgttcagatgaaaaacagaaaattcagtcattccgagtttagaaatccggtcagggattttattggctggagtaatagttcaaaggagtgaaaattcaagcatgtaatttttggatttgatttcctccataatgatttcctccataatggctttttttcaagcatggtctaatttttcagaaaatggccattatctccaagcttccattgtccatgtagtttcagtggcaggagagagactattttcctcccagtgtccatgtcagttccccaaaaggactgaatagccatgttggttttggagccagccgtaatccaatctgtatttccaaggaaatggggttctttgtctcccagcattgggaagcaagagaggcacatgttatggtcacctctgtgaggattacatcaggaaggacagtctccaaaagacatggacagaggaaatttagcagatgtccattaaatcaggatctcatacaagttataacacctgaatgtttgacttttcagagtattttgccatcacaggtgtggcatcttgcccttggatatatctacattctgctgtagaatgtcgtggtctttctgagggtcacatacatcctgtcttgtcataatgttaaccattaagagtcctcaggggcatggaattgaagaaggaactgttgccagcagttaactgaccaagctagagttccctgacccaacgtaagggtgactgtgacacacatggataattttagcttcatgtttaagattttgttatttgggtaggaaacattccaaatgcagtttgaaacacatattaaaattgaggcacacaggaaagaactggctcaagtttagtccccaagttccttatagtaggaataggaatccttagagtataagcaatccatgcatagtattctgttatctatcatgtagatcatttaatctctaattttttggggtggggattctcttgtttctaaatcttacactttcagtttcttctgtgtcttaaatatagattattgactattgtcttaaatactaataaatacattaaatgtatcttaaatacta

SEQ ID NO: 2450 - DNA, 6249 bp, Homo sapiens
gtaaacagcgcagggcatttcgggagcgggattgtttcgcgcaggaagcaggctccattttagcgccgcccgccgtcgccatctgtttcccttccctcccccatacctagcccgagtctgagccctaacgagaaggctgggcctaggccgctggatgctggagtgaaaggaagggagaaagggaaaaagcgggaagagtcgagaaggctgagtgttaagaggccaagtgcgacgcgcgtatccgggcagacggactgacggacgggcccgtgcttctgccgcggctgcggcgcccgcgcgagtcgcgtctaagcggcggcggcggtggcagcggcggaaaccgaaggggagccatggcggctgacagtcgggaggagaaagatggagaacttaatgttctggatgatattttaactgaagtaccagaacaagatgatgaactgtataatccagagagtgaacaagataaaaatgagaaaaagggatcaaaaagaaaaagtgatcgaatggaatctactgataccaaacgacaaaagccttctgtccattcaagacaactggtttctaagccactgagctcatctgttagcaataacaaaagaatagttagtacaaaaggaaagtcagccacagagtataaaaatgaggaatatcaaagatctgaaagaaacaagcgtctagatgctgatcggaaaattcgtctatcaagtagtgcctccagagaaccttataagaatcaacctgaaaaaacctgtgtccggaaaagggatcctgaaaggagggccaaatctcctacgccagatggttctgagagaattgggcttgaagtggatagacgtgcaagcagatccagccagtcttctaaggaagaagtgaactctgaagaatatggctctgaccatgagactggcagcagtggttcttctgatgagcaagggaacaacactgagaatgaggaggaaggagtggaagaagatgtggaggaagatgaagaagtagaagaagatgcagaagaagatgaagaggtggatgaagatggagaggaggaggaggaagaggaggaggaggaagaggaggaggaggaggaggaagaagaagaatatgaacaggatgagagagaccagaaagaggagggaaatgattatgacactcgaagtgaggccagtgactctggttctgaatctgtttccttcacagatgggtctgtcagatctggttcaggcacagatggatcagatgagaaaaagaaggaaaggaagagagctagaggcatatctccaattgtttttgatagaagtggaagctctgcatcagagtcatatgcaggttcagaaaagaagcatgagaaattatcatcttccgttcgtgctgtccgaaaagatcaaaccagtaaactcaaatatgtgcttcaagatgcaagatttttcctcataaagagtaacaaccatgagaatgtgtctcttgccaaagcgaagggtgtatggtccacgctccctgtaaatgagaagaaattaaatcttgcatttagatctgcaaggagtgttatcttaatattttctgtcagagagagtggaaaatttcaagggtttgcaagactttcttcagaatcacatcacggaggatctcctatacactgggtgcttccagcaggaatgagtgctaaaatgctgggaggtgtctttaaaattgactggatttgcaggcgtgaattacccttcactaagtcggctcatctcaccaatccttggaatgaacataaaccagtaaagatcggacgtgatggacaggaaattgaacttgaatgtggaacccagctttgtcttctgtttccccccgatgaaagtattgacttgtatcaggtcattcataaaatgcgtcacaagagaagaatgcattctcagccccgatcacgaggacgtccatcccgtcgagaaccagtccgggatgtgggaaggcgtcgaccagaagattatgatattcataacagcagaaagaaaccaaggattgactatccccctgagtttcaccagagaccagggtatttaaaggatccacgataccaggaagtggacagacgattttcaggagttcgccgagatgtgtttttaaatgggtcctacaatgattatgtgagggaatttcataacatgggaccaccaccaccttggcaaggaatgcccccttacccaggaatggaacaacctccacaccatccttactatcagcaccatgctccacctcctcaagctcatcccccttactcaggacatcatccagtaccacatgaagcaagatacagagataaacgagtacatgattatgatatgagggtggatgatttccttcgtcgcacacaagctgttgtcagtggccggagaagtagaccccgtgaaagagaccgggaacgagagcgagaccgccctagagataacagacgagacagagagcgagatagaggacgtgatagagaaagagaaagagagcgattatgtgatcgagacagagaccgaggggagagaggtcgatatagaagataatgggcttttggaagcactgattgtttaaagatacaaaaaatcttgtattttttttttgtgtgtgtttacaagtagtaaatttattttcagctgtctgcctatgaagttcattgtgtagaaggatttattatgaccccctttgttccaagcatgcagtatcataagaactggaaaaactcaaatccgccaaaaatccacagctgacagttgaattgacacttttattggggcagaatggaacagtccaagaatgtagatactgattctttctccataaatgttcttatagtgtgttcatcctagagttatttttttgtttgtttttttcctttttggatcttgattgataactgccatgatattttgctttgatgtgtttctacatgtagttgcacacggttcagtaaaaataatgctgctatcgagtatgcaaatattgaagtatgatggtttgactgtatggcagtgttgtagcagcctcttgtttttttccccattgcctctttttttaaaaaacttataaagtcactttttatttttcctcagtcttcaatgacgagagcaatattaagaagacattgctatctaatttttaatctttttaaatgaaaaattcctatgttcagtagcgtggttgatgctattgtttagccttcccctccaaattgtatacattggcttggaatgttcacaacttgcgtgcgtggcagcggaagacgattcccatattctacattgctactgttttgtataaaataaattggtaaagattgacggttatcttttgtatctttttcttatccaattgcaggtttgttttattatgcaataatggacataaaagcatgctttttgttcaggaattttaggaaccccatttgctttttttgaggcacactttagcagaaatgattgacctaggcctgttgcattaaaagcttacttctatttctaacataagatacacagagttatgttaataatttggttaagtatttatacacctgataacattttgagtctactctgatcacagaatcgtttatttaggttttctatttgttgttttagtcttctgtaagtgaacgactttgtacatgctttctactttacttcataaatggacttttaaccctcttgtattagttctgtattttaagttaactgtccagttctcccagtggtaaccaactataacatagaaatagagccgctcaagaaaacagtttatgaaataatttttttgaattttttcttgagttacacctggagttttggcctttggaatttggcctttataaacattaggaatatttgaatgtttgatttttttatagtatcaacagttgtactgtgtaccagatcacatagtacagttttacatttaatctatattggcctgaaaagaacaacacaggcactttactcttaaaggatataataaactatagttatactgcattcatattcataccagcatgtagtatctttccctgcattcacagaagttttatttacaatgacaaaactaaagcctgaggatttgttttaaatctgcattgtggtagagaggaaaaagtacttttaaggaaacctgggttctagttttgtcattgtctttaattaaaccggttagtgatacatggtaagtcacttcattggcattttgtgtattcatcagtaagctagacaagatgatagctacagtttaagaatttctgtaaccattatacaaaactggtaggtaatattaaaggtattttcctgaaataataggaataaatactgagcactttgtatgcaatagagactttgtgcttttatatacagactcatttaaatgggctcagagaggctagtaaacttgcccaagattagaaaggtagtaattgatgggccaagattttacccatgtttttatttggtgtttctaaaccacctcatcacttttgaaaaaacagtatataaattaataaatgttttggagatggagtctgtcgcccaggtggagggcagtggcatgatcttggctcactgcaacctcctgcctcagcctcccgaatggctgggactacaggcacccaccaccacaccccgctaatttttgtaattttagtagagatggggttccaacatgttggccaggctggtctcaaactcgacctcaagtgacctcacctgcctcagcctcctaaagtgttgggattacaggcgtgagccactgcacctggcctgagatttttaaacattaacatttccttcaggcttaagcagaggatttttctaaagtgccatccaattagatgttaagttatgctttgtatgttgagcttagtattgagtcgatctattttaaaaagccaacattaagtttttaccaagtatctggcactattctaaacaattctgttggctcacataatcatcactgttttctcctttcctaatttttaaaataaacttaccggaacattgtataaaaaatgcaagatttttttctgtacagaagagtcagtatataaaaatcagtatgttttatttaatattcgtacacatgacagcttttgtcactgtgagaagacatggtttctttcgtgtactccactgtgctgtgattctaacaatctacattagtatgatgtgttcagatgaaaaacagaaaattcagtcattccgagtttagaaatccggtcagggattttattggctggagtaatagttcaaaggagtgaaaattcaagcatgtaatttttggatttgatttcctccataatgatttcctccataatggctttttttcaagcatggtctaatttttcagaaaatggccattatctccaagcttccattgtccatgtagtttcagtggcaggagagagactattttcctcccagtgtccatgtcagttccccaaaaggactgaatagccatgttggttttggagccagccgtaatccaatctgtatttccaaggaaatggggttctttgtctcccagcattgggaagcaagagaggcacatgttatggtcacctctgtgaggattacatcaggaaggacagtctccaaaagacatggacagaggaaatttagcagatgtccattaaatcaggatctcatacaagttataacacctgaatgtttgacttttcagagtattttgccatcacaggtgtggcatcttgcccttggatatatctacattctgctgtagaatgtcgtggtctttctgagggtcacatacatcctgtcttgtcataatgttaaccattaagagtcctcaggggcatggaattgaagaaggaactgttgccagcagttaactgaccaagctagagttccctgacccaacgtaagggtgactgtgacacacatggataattttagcttcatgtttaagattttgttatttgggtaggaaacattccaaatgcagtttgaaacacatattaaaattgaggcacacaggaaagaactggctcaagtttagtccccaagttccttatagtaggaataggaatccttagagtataagcaatccatgcatagtattctgttatctatcatgtagatcatttaatctctaattttttggggtggggattctcttgtttctaaatcttacactttcagtttcttctgtgtcttaaatatagattattgactattgtcttaaatactaataaatacattaaatgtatcttaaatacta

SEQ ID NO: 2451 - DNA, 2166 bp, Homo sapiens
gtggtgggactcgcgtcgcggccgcggagacgtgaagctctcgaggctcctcccgctgcgggtcggcgctcgccctcgctctcctcgccctccgccccggccccggccccgcgcccgccatggagaagactgagctgatccagaaggccaagctggccgagcaggccgagcgctacgacgacatggccacctgcatgaaggcagtgaccgagcagggcgccgagctgtccaacgaggagcgcaacctgctctccgtggcctacaagaacgtggtcgggggccgcaggtccgcctggagggtcatctctagcatcgagcagaagaccgacacctccgacaagaagttgcagctgattaaggactatcgggagaaagtggagtccgagctgagatccatctgcaccacggtgctggaattgttggataaatatttaatagccaatgcaactaatccagagagtaaggtcttctatctgaaaatgaagggtgattacttccggtaccttgctgaagttgcgtgtggtgatgatcgaaaacaaacgatagataattcccaaggagcttaccaagaggcatttgatataagcaagaaagagatgcaacccacacacccaatccgcctggggcttgctcttaacttttctgtattttactatgagattcttaataacccagagcttgcctgcacgctggctaaaacggcttttgatgaggccattgctgaacttgatacactgaatgaagactcatacaaagacagcaccctcatcatgcagttgcttagagacaacctaacactttggacatcagacagtgcaggagaagaatgtgatgcggcagaaggggctgaaaactaaatccatacagggtgtcatccttctttccttcaagaaacctttttacacatctccattccttattccacttggatttcctatagcaaagaaacccattcatgtgtatggaatcaactgtttatagtcttttcacactgcagctttgggaaaacttcattccttgatttgtgtttgtcttggccttcctggtgtgcagtactgctgtagaaaagtattaatagcttcatttcatataaacataagtaactcccaaacacttatgtagaggactaaaaatgtatctggtatttaagtaatctgaaccagttctgcaagtgactgtgttttgtattactgtgaaaataagaaaatgtagttaattacaatttaaagagtattccacataacttcttaatttctacattccctcccttactcttcgggggtttcctttcagtaagcaacttttccatgctcttaatgtattcctttttagtaggaatccggaagtattagattgaatggaaaagcacttgccatctctgtctaggggtcacaaattgaaatggctcctgtatcacatacggaggtcttgtgtatctgtggcaacagggagtttccttattcactctttatttgctgctgtttaagttgccaacctcccctcccaataaaaattcacttacacctcctgcctttgtagttctggtattcactttactatgtgatagaagtagcatgttgctgccagaatacaagcattgcttttggcaaattaaagtgcatgtcatttcttaatacactagaaaggggaaataaattaaagtacacaagtccaagtctaaaactttagtacttttccatgcagatttgtgcacatgtgagagggtgtccagtttgtctagtgattgttatttagagagttggaccactattgtgtgttgctaatcattgactgtagtcccaaaaaagccttgtgaaaatgttatgccctatgtaacagcagagtaacataaaataaaagtacattttataaaccatttactatggctttgtaacaattgcatacccatattttaagggacaggtgaatttactactttctaaagtttattgatacttcccttttatgtaaaatgtagtagtgatacctatatttccacattgtgcattgtgacacacttgtctagggatgcctggaagtgtataaaattggactgcatttcttagagtgttttactatagatcagtctcatgggccatctcttcctcagatgtaaatgatatctggttaagtgttatatggaataaagtggacattttaaaacta

SEQ ID NO: 2452 - DNA, 2834 bp, Homo sapiens
gcccactcccaccgccagctggaaccctggggactacgacgtccctcaaaccttgcttctaggagataaaaagaacatccagtcatggataaaaatgagctggttcagaaggccaaactggccgagcaggctgagcgatatgatgacatggcagcctgcatgaagtctgtaactgagcaaggagctgaattatccaatgaggagaggaatcttctctcagttgcttataaaaatgttgtaggagcccgtaggtcatcttggagggtcgtctcaagtattgaacaaaagacggaaggtgctgagaaaaaacagcagatggctcgagaatacagagagaaaattgagacggagctaagagatatctgcaatgatgtactgtctcttttggaaaagttcttgatccccaatgcttcacaagcagagagcaaagtcttctatttgaaaatgaaaggagattactaccgttacttggctgaggttgccgctggtgatgacaagaaagggattgtcgatcagtcacaacaagcataccaagaagcttttgaaatcagcaaaaaggaaatgcaaccaacacatcctatcagactgggtctggcccttaacttctctgtgttctattatgagattctgaactccccagagaaagcctgctctcttgcaaagacagcttttgatgaagccattgctgaacttgatacattaagtgaagagtcatacaaagacagcacgctaataatgcaattactgagagacaacttgacattgtggacatcggatacccaaggagacgaagctgaagcaggagaaggaggggaaaattaaccggccttccaacttttgtctgcctcattctaaaatttacacagtagaccatttgtcatccatgctgtcccacaaatagttttttgtttacgatttatgacaggtttatgttacttctatttgaatttctatatttcccatgtggtttttatgtttaatattaggggagtagagccagttaacatttagggagttatctgttttcatcttgaggtggccaatatggggatgtggaatttttatacaagttataagtgtttggcatagtacttttggtacattgtggcttcaaaagggccagtgtaaaactgcttccatgtctaagcaaagaaaactgcctacatactggtttgtcctggcggggaataaaagggatcattggttccagtcacaggtgtagtaattgtgggtactttaaggtttggagcacttacaaggctgtggtagaatcataccccatggataccacatattaaaccatgtatatctgtggaatactcaatgtgtacacctttgactacagctgcagaagtgttcctttagacaaagttgtgacccattttactctggataagggcagaaacggttcacattccattatttgtaaagttacctgctgttagctttcattatttttgctacactcattttatttgtatttaaatgttttaggcaacctaagaacaaatgtaaaagtaaagatgcaggaaaaatgaattgcttggtattcattacttcatgtatatcaagcacagcagtaaaacaaaaacccatgtatttaacttttttttaggatttttgcttttgtgattttttttttttttttttgatacttgcctaacatgcatgtgctgtaaaaatagttaacagggaaataacttgagatgatggctagctttgtttaatgtcttatgaaattttcatgaacaatccaagcataattgttaagaacacgtgtattaaattcatgtaagtggaataaaagttttatgaatggacttttcaactactttctctacagcttttcatgtaaattagtcttggttctgaaacttctctaaaggaaattgtacattttttgaaatttattccttattccctcttggcagctaatgggctcttaccaagtttaaacacaaaatttatcataacaaaaatactactaatataactactgtttccatgtcccatgatcccctctcttcctccccaccctgaaaaaaatgagttcctattttttctgggagagggggggattgattagaaaaaaatgtagtgtgttccatttaaaattttggcatatggcattttctaacttaggaagccacaatgttcttggcccatcatgacattgggtagcattaactgtaagttttgtgcttccaaatcactttttggtttttaagaatttcttgatactcttatagcctgccttcaattttgatcctttattctttctatttgtcaggtgcacaagattaccttcctgttttagccttctgtcttgtcaccaaccattcttacttggtggccatgtacttggaaaaaggccgcatgatctttctggctccactcagtgtctaaggcaccctgcttcctttgcttgcatcccacagactatttccctcatcctatttactgcagcaaatctctccttagttgatgagactgtgtttatctccctttaaaaccctacctatcctgaatggtctgtcattgtctgcctttaaaatccttcctctttcttcctcctctattctctaaataatgatggggctaagttatacccaaagctcactttacaaaatatttcctcagtactttgcagaaaacaccaaacaaaaatgccattttaaaaaaggtgtattttttcttttagaatgtaagctcctcaagagcagggacaatgttttctgtatgttctattgtgcctagtacactgtaaatgctcaataaatattgatgatgggaggcagtgagtcttgatgataagggtgagaaactgaaatccc

SEQ ID NO: 2453 - DNA, 5747 bp, Homo sapiens
ctcttttccctcacagcccgggcgccgggcggcgagtgcgttagtcggccgggacgcggagctgtgtgcatctcctacgcgggctcgctcgctcccgggagccgcgcagcttccccggcggtggcaggagcggcgaagagcgccatcagcgggcccttacggccccaggcctcgcggcgcgcggtccgctcgccctcctcgtccgcccaacctgcggcctgtggaggcgtgaggcgacgacaggcgagcgcctcgagcagcgttagccgctgcggccgccggtcctccctccacctcctcctcggccccccctcgcttccctcctcccacttcccgagctccggcgtgtcccggccacgctcgacgctgctgcaggaacaaaggaagaccccgcggcggcggcggcgccacctccgcctgctgctccgacccgctcccggcccgcggcggcggcaccagggcgcccggctcagccttcccggaggcctcggcccggcctcatcgtgccggcttcgcgcgcgaacccggctttcgcatttgggaccctgcaggaaaaatatggctcaggagactaaccagaccccggggcccatgctgtgtagcacaggatgtggcttttatggaaatcctaggacaaatggaatgtgttcagtttgctacaaagaacatcttcagaggcagcaaaatagtggcagaatgagcccaatgggaacagctagtggttccaacagtcctacctcagattctgcatctgtacagagagcagacactagcttaaacaactgtgaaggtgctgctggcagcacatctgaaaaatcaagaaatgtgcctgtggctgccttgcctgtaactcagcaaatgacagaaatgagcatttcaagagaggacaaaataactaccccgaaaacagaggtgtcagagccagttgtcactcagcccagtccatcagtttctcagcccagtacttctcagagtgaagaaaaagctcctgaattgcccaaaccaaagaaaaacagatgtttcatgtgcagaaagaaagttggtcttacagggtttgactgccgatgtggaaatttgttttgtggacttcaccgttactctgacaagcacaactgtccgtatgattacaaagcagaagctgcagcaaaaatcagaaaagagaatccagttgttgtggctgaaaaaattcagagaatataaattacttcttgtgaagagactgaaactttgtttttattttaatatatcgtaggaaaacattaaagagcagatgcatggccatttttctttgatgttctccagagttttacattacacttgtctgtcttataattgatattttaggatgtttgggtgtttgttacaggcagaattggatagatacagccctacaaatgtatatgccctcccctgaaaaaaattggatgaaaatctgcacagcaaagtgaaacacacagataataggaacaaaatgtagttcccatgtgccaaacaaaataaatgaaatctctgcatgtttgcagcatatctgccttttgggaatgtaatcaaggtataatctttggctagtgttatgtgcctgtatttttttaaaatggtacaccagaaaaggactggcagtctacttctaccatagttaaacttcaccctctttaatttcacaacatattctttggaagcaggaagaaatgctcataaagaggatcagaccttctttcccgtgaaaccagtatttggcgccatatataagcctggttaaattggtcatctaaagctgtcaaataagacattctgtgaaaggtaaacatcgaaactggttataagtaaaaccatcaagccaacaacagggtcttgagataacctttgaagcttattgtactggcctgcaccagaagatgtctgcattactcattgctaaaaatgtgtagcacagaactgcactaggattaatttgtttacaagaagaaatttaaactctacgtttggttttcacatacagcagctctattgaataacatgcatctgaattttaagttgcaaaggtatctgaataatttttcatgtgcatcttttgtcgaatgttttggttcaagaaagaatgtttaaagctttttaaaagacttcagttcttaatgtaactgtacccttctgcatggaaaatcataaccaacatggctgcagtagacttcttagtggtatccagcaccacttgcagagggctgctttatcatattgtacttgggtgtaggactctagtgttcttgggtgtattgcatgggctgcattatctacagcattgtacaataacaactagaaaaggcagtatacttcactgatgcttgtctggtaataatcacttctgtgttataatggaaggttttttgtgatgtatgaaacttgtgttttttatatataaatgagtatagttagtgttgtggtaatgcctgttttcatctgtaaatagttaagtatgtacacgaggcactacttctgatttattgcaatgttcagtcctagtttttacttttattcttaaagcattcagttttgctttcaattttatgtaccttagttctgagttagacctgcagatgtgtacagatagttcatatttatgtattgcacataatcatgctattcagcattgatgctatattgtattatgtaaataataaaagccatgtacagagggaaacttcacttgttcattgggtttttaagccatagttggagtcctaaagggggaaaattagaaaatgttactttacatggctatataattttttttcctttgccatcgctgaacttgttcaagtgataatcaagagatattagaagcatttgcaggtatgatacctgataggcagtttatttttgaagaattcaataggcacctttgggattaaaacaattttaaaatttgagaaagatgaaatttgaacaattatggcctacctcgcttctccatgttgtaaaagatgatgttttatgacaattctgaagaagaaagtaggtatgacttagtttacaaaaagagttctgttttatttctgttttgggtttggctctaatacagagattcacccatggacttggtctctgtagcgtttatgccagatcataaagaacaaggggtgacaggtacatgttgactttacctggggtaaatgattaccagagtgcaactgttgcttctctgtgatggagtttggggtggaaataccctagttttatctgtcagttctttgcatgctgctacttttgcttcaagttagggaggtacatatgtatgtcaaagttcctatactgacatagggtagtatttctctgaatatgaaaagtcacaattgagttgaaaatttagaagttgaagatttagaagggcaacttaatttttcaagttaaaaatggaagtaagagtggtatagagaaggtaagatgagccctcggactccatcactctgaaggtctgagtagtagcaagagatagatttttgtttggccaggctgcagtgcaatggcgtaatcttggctcactgcaacctctgcctcctgggttcaagtgattctcctgcctctgcctcctaagtagctgggatcacaggcaccagccaccacgcccagctaatttttgtatttttaatagagacagtttctccatgttggtcaggctggtcttgaactcctgacctcaggtgagctgcccgcctcggcctcccaaagtgctgggattacaggcgtgaggcaccgcacccggccaatcagttttttttgttttttttttgtttgtttgttttacaagaaacattaaaccagatcagaacaaagatttgtcagggttgtccattgactggggagaaagggaatcagtgtgtaaggcacctgagaggactcagttctacccaaattcttgcattcaaacctgaatgcaaggccatgaagtcctttgaaatgtacagatattaagcaatttaataatataccatgtttcccttacataagcagacaaatatttacacccccatgacctgaagttttgttaggctgtgaccacatgaattcgcagtataaatgggtgagtcctttttgaaaacctcatcttcagtgtgcctgatctgtaaaactagagcctcaggtttgatcctaggtaggcttcccacaacgtggggaaaattagtttgtgagggaaagctgtttctgagcattatggcatagtgattaagatgagggaccctggaaccagcccgtgattttgggcaagttattttaggtccactttggactgcttcatctcttaaatgaagacagcaaccaccttcaggagtgtgaaggtgacaacacttaaaactgtgcctggcacattgtatttgctattgtcttaatgttctggaataatggtttccataacttgggaagaaaactttgagaacaggattggttacatcaagttgtatagtgaaaagataaagatttgttatttaaacttgcagtttaaagtcattagaatcattcttttccgtaaggctttctttgcaagagatctgcattaaataaagttgctaggaaataactaaaattggggaaataatctaataatagcaagatgttaagcatactattattgtattttgggggttggtaataacattcacatggatttatcaatacacactgagaagcaaagcctctcaagctgtcccatatcctccatttcaaaggcacacatacattttaggtaactcataatttagaaaggttatttaatcttttccacatgtaaatatttgaatatgtacaaagacttgatttgactcttgtctgtttttgttttgttttgtttgtttgagacagaggctccgtcgcccaggctggagtaaaatggcatggtctcagctcactgcaagttccgcctcccgggttcacgccattctcctggctcagcctccggagtagttgggactacaggcacccgtcaccacacctggctaatgttttttgttttttgggtttttttgtatttttagtagagagagggtttcaccgtgttagccagggtggtctcgatctcctgacctcatgatccgcccaccccggcctcccaaaatgctgggattacaggtgtgagccactgcgcctggccgactcttgtctgtttgaatgcaaagttctcaatagtggtttttgtccataagtattaacttataattttggagagtgataggtatggttgctggttgattagcaataagattatgtagccttaaactagctagaagagtttgcatgggtgaggcaacaggctgttaacaaaaagaaactggaaatacagtttcccctgtttgtttctcctgtttgtacaatctgctttaaaaacaagtgaacatgcaccatgtcagtcatggtgaatcggccaacagccagcccttgccagttgacatcacagtctaagatgggaaactggtacagatagacatgaagagagcttagcagtggttgaggtggtgactaaatatacagtcattgaataaataccgtgtagcaaatgtaaaaaaaaaaaaaaaagtacaacagaatacaaaagtgccatttaatattttatagctatttctatgcacaagtgctggttttaaatttatataaaagcaaagactgtttctgtgttttcttccagagtatttctgttacagccatagaagtaaagttaataaatgtaagactttttttgtttaaaaaaaaaaaaaaaaaaa

SEQ ID NO: 2454 - DNA, 3867 bp, Homo sapiens
actgtcttcctcattggcgccgtgcagagaggcggaatgttcaactcctaactgcggcggaaacgtgggagccgcgcgggccgctgtcgtcccaacccccgccgccctcgtcgcgcgcggggcctccgcgcccccggctgctgctcacgccccgcccgggagccagattttgtggaagtataatactttgtcattatgagatgtcgtctctcggtgcctcctttgtgcaaattaaatttgatgacttgcagttttttgaaaactgcggtggaggaagttttgggagtgtttatcgagccaaatggatatcacaggacaaggaggtggctgtaaagaagctcctcaaaatagagaaagaggcagaaatactcagtgtcctcagtcacagaaacatcatccagttttatggagtaattcttgaacctcccaactatggcattgtcacagaatatgcttctctgggatcactctatgattacattaacagtaacagaagtgaggagatggatatggatcacattatgacctgggccactgatgtagccaaaggaatgcattatttacatatggaggctcctgtcaaggtgattcacagagacctcaagtcaagaaacgttgttatagctgctgatggagtattgaagatctgtgactttggtgcctctcggttccataaccatacaacacacatgtccttggttggaactttcccatggatggctccagaagttatccagagtctccctgtgtcagaaacttgtgacacatattcctatggtgtggttctctgggagatgctaacaagggaggtcccctttaaaggtttggaaggattacaagtagcttggcttgtagtggaaaaaaacgagagattaaccattccaagcagttgccccagaagttttgctgaactgttacatcagtgttgggaagctgatgccaagaaacggccatcattcaagcaaatcatttcaatcctggagtccatgtcaaatgacacgagccttcctgacaagtgtaactcattcctacacaacaaggcggagtggaggtgcgaaattgaggcaactcttgagaggctaaagaaactagagcgtgatctcagctttaaggagcaggagcttaaagaacgagaaagacgtttaaagatgtgggagcaaaagctgacagagcagtccaacaccccgctgctgccttcctttgagattggtgcatggacggaagacgatgtgtattgttgggttcagcagctcgtcagaaaaggtgactcttcagcagagatgagtgtatatgcaagcttgtttaaagaaaacaacattacagggaagcggctgctgctgctggaggaagaagacctgaaagacatgggcattgtctccaaggggcatatcattcacttcaagtcagccattgagaaattaacccatgattacataaatttgtttcacttcccaccactaattaaggactcaggaggtgaacctgaagaaaatgaggaaaaaatagtgaacctggaactggtttttggttttcacttgaaaccaggaactggcccacaggattgtaagtggaaaatgtatatggagatggatggggatgaaattgcaataacctacataaaagatgtgacattcaacactaacctacctgatgcggagattttaaagatgacaaagccaccatttgtaatggagaagtggattgtaggaatagcaaaaagtcagactgtggagtgcactgtcacatatgagagtgatgttagaactccaaaaagcactaaacatgtccattcgattcagtggagtagaacaaaacctcaggatgaagtgaaagcagtccaacttgccattcagacattattcaccaattcagatggcaaccctggaagcaggtccgactcaagtgctgattgccagtggttagatactctgaggatgcggcagattgcatccaacacttctttacagcgttcccagagcaatcctattctggggtcaccgttcttctcacactttgatggccaggattcctacgctgctgctgtgagacggccccaggtgcccattaagtatcaacagattacacctgtgaaccagtccagaagctcgtctcctactcagtatggactgaccaaaaacttctcttccctacatctcaactctagggacagtggcttttccagtggcaatactgacacctcttcagagaggggtcgatactcagacagaagcaggaacaaatatggacgtggtagtatatcactcaattcttctcctagaggaagatacagtggaaagagtcagcattccactccttcaagaggaagataccctggaaagttctacagggtttctcagtcagcactcaatcctcaccagtcgcctgacttcaagagaagccccagggacctccaccaacccaacaccataccagggatgcctttgcaccctgagactgactcaagagccagtgaagaggacagcaaagtcagcgaagggggctggacaaaagtggaataccggaaaaagccccacaggccatctcccgccaaaaccaataaagagagagccagaggggaccaccgtggatggagaaacttttgatgaattgaactacatagcttttctaagcaggttaaaaaaaaaaaaaaaaagaaatgtaatggtttttgataatatgatcccttcagattgaattaacgaaaagacaacacttccagtttttggattgggaaataccttctaattgagactatagccaaaccagggccaaaattatggatattggtcacccagtgatcataactaggcttgaaaatcactacacatattttctgccttgagtgaacatttttagaggaaaggttatgccatctttttaccctaaccactgatattctggttagcagggccaggacaaggggaaggaaaatgaggtcaacaaaaaaatcaaatttttaggaaaagataagatgaatgttactgatttttccttttggctgaggctgcaatatggcctggcaaggcactgttactgatcttgtctttaacattttgatattttgttcatcataatttttgcatttatttttttaaatattgcattaaaatatcatttagcttgattatcgagttttttggtttgaggttttttgttgcttcttttttcttttctttctttccccctcttttttttggatgtccccttaaattttgtgcccaaggcaggtacctcactcatctcatccttggctcagccctgctggttagtatttagtatttattttagtaagatatttgtgtctgtatgatggtcagagttgaactgatctggcttgtcatttttcagtaataaaaaaagttactgaatttaatgttgaatatgatgcatatctcattcattacgatttatcagaaaccaaagatttaaattgcctagatttgtggttctttctcttcctaagttcccagcgactgctttcaaatactattttctaaatttcaccaaaggagcaaagaggataaaacaacactccataaaggcctcttgggatgtcagaaatctaaaatctaaaagaaaacagacacagagcaagacaataacatcacaagctaaaagccagagaaatttaaaattaccaacatccttgttggagtaagacagtaaatatcagccttgcagcaagacagctctgagcagctgtgggcaaagaggtaaaccagtgggggtgcaaggagactgtctgcagcttagggcagaaatggtgggatccaacttgtgaaatgcttcatgttttacaaaccaaaaagtcaggtagcaacaaacttattgtatgtcaaatcaataaatgttactttcaataaaaaa

SEQ ID NO: 2455 - DNA, 7194 bp, Homo sapiens
actgtcttcctcattggcgccgtgcagagaggcggaatgttcaactcctaactgcggcggaaacgtgggagccgcgcgggccgctgtcgtcccaacccccgccgccctcgtcgcgcgcggggcctccgcgcccccggctgctgctcacgccccgcccgggagccagattttgtggaagtataatactttgtcattatgagatgtcgtctctcggtgcctcctttgtgcaaattaaatttgatgacttgcagttttttgaaaactgcggtggaggaagttttgggagtgtttatcgagccaaatggatatcacaggacaaggaggtggctgtaaagaagctcctcaaaatagagaaagaggcagaaatactcagtgtcctcagtcacagaaacatcatccagttttatggagtaattcttgaacctcccaactatggcattgtcacagaatatgcttctctgggatcactctatgattacattaacagtaacagaagtgaggagatggatatggatcacattatgacctgggccactgatgtagccaaaggaatgcattatttacatatggaggctcctgtcaaggtgattcacagagacctcaagtcaagaaacgttgttatagctgctgatggagtattgaagatctgtgactttggtgcctctcggttccataaccatacaacacacatgtccttggttggaactttcccatggatggctccagaagttatccagagtctccctgtgtcagaaacttgtgacacatattcctatggtgtggttctctgggagatgctaacaagggaggtcccctttaaaggtttggaaggattacaagtagcttggcttgtagtggaaaaaaacgagagattaaccattccaagcagttgccccagaagttttgctgaactgttacatcagtgttgggaagctgatgccaagaaacggccatcattcaagcaaatcatttcaatcctggagtccatgtcaaatgacacgagccttcctgacaagtgtaactcattcctacacaacaaggcggagtggaggtgcgaaattgaggcaactcttgagaggctaaagaaactagagcgtgatctcagctttaaggagcaggagcttaaagaacgagaaagacgtttaaagatgtgggagcaaaagctgacagagcagtccaacaccccgcttctcttgcctcttgctgcaagaatgtctgaggagtcttactttgaatctaaaacagaggagtcaaacagtgcagagatgtcatgtcagatcacagcaacaagtaacggggagggccatggcatgaacccaagtctgcaggccatgatgctgatgggctttggggatatcttctcaatgaacaaagcaggagctgtgatgcattctgggatgcagataaacatgcaagccaagcagaattcttccaaaaccacatctaagagaagggggaagaaagtcaacatggctctggggttcagtgattttgacttgtcagaaggtgacgatgatgatgatgatgacggtgaggaggaggataatgacatggataatagtgaatgaaagcagaaagcaaagtaataaaatcacaaatgtttggaaaacacaaaagtaacttgtttatctcagtctgtacaaaaacagtaaggaggcagaaagccaagcactgcatttttaggccaatcacatttacatgaccgtaatttcttatcaattctacttttatttttgcttacagaaaaacggggggagaattaagccaaagaagtatatttatgaatcagcaaatgtggtgcctgattatagaaatttgtgatcctatatacaatataggacttttaaagttgtgacattctggctttttcttttaatgaatactttttagtttgtatttgactttatttcctttattcaaatcatttttaaaaacttacattttgaacaaacactcttaactcctaattgttctttgacacgtagtaattctgtgacatactttttttttcttatagcaatacactgtaatatcagaaatggttggcctgagcaacctagtaagacctcgtctctactaataattaaaaaactagctggcatggtagcacacacctgtagtcccagatacttgggaggccaaggcaggaggattgcttgagacctagcaatcagtcagggctgcagtgagccatgatggcaccactgcactctagcctgggcaagagaacaagatcctgtctcaaaaaacaaaaaaaagaaagaattgatagtacaaaatccaacaacaatactgagatgatctaagaaggttataacaaaatgctcttcagaaatacctaagtgctgagaatttttagtactaaagagcacagctgctcaaagtaaagcctgagcagtgttctcagtaatgtatttgaaggaaaaataccctgatttgaaaccaacagcagatgttgcaaactttcataccactgctggccatggaagcctcttaacaacacactgtcatttaaggctgtgcttgtgctttatacaaagagaaagaggtggtcttaaggggatgcttccaggggggtgagttcatgcctctcctgtattttccagcaagtggggtatgtgtggtggtttgttttttagaggggcataataatccaggattctaagcatatgctcagctattttaaagaggaaattaaatattataaaagaaatagtaaagataagttatcctcacttaggcaaaagcacaggtcctttccatatcaagtttagcctaccagggttgttttttgttttaaccctgcttaataatgttggtgttttagaagtagatacaggcactgctctgaaaacctggctagccaaggatattctcagaatgttatcacctgtttgtcaaagcttgtttaaattataaaacacttttaattatatatatgaggcaaaagaactaagacttttttcaaactaaattagaaaggagtgtcattatttgactgttaaaccaaaatatttttggtgggtctttttatggaagtttaaagaaaggacatcatcatagatatgatctaacagtatttctaactatatttgatcattaaaagcctcttggaatttgaagcgtgacgtgtttctaatgccccttgagaggtgaaaaataccacataatgatcagtatgctgtgccagcttcatttggggagaaataactagtagaaagttctgggtgtgaggtgtacagcagtctaggtggcatagtgatgaagaaagggatcagagtctgactgtcactcagaatcctgggctcagttgcttgacaaccttgggaaaattgttttatctttgtgcgtctgtttgctgatcttcagcgtgggaataataacagtacctacttgaaaggatcattgtgcggattaaaagaaataatatatgtaaagcactttaacacagcaccaggcccacggaaagtggctaatgttagctactatgaatggtgccagtgaagacactgaaaaataagtgatttcagtaaccttctggaaagctatcagtttcaaataatattttctctgtagtatgagatgaaattaaaagtggatagctttcaggaaagataaagagaacatgcttagaatgtaagctaaacagattttttctgttgctctttgaaaactatgagccctggccagcttaacctggtctgaggtgagactaaacacaaaaacagtagataaatctctccctaaaagatggattcccccacatacccatgctactagtttctctgtctattcacacatatgtacaaatacatgaacacagcctgtctgtgctcagacatagagaagtactacctgacttgagtcaatgcacccaagaagaaaagcttggagtagagcagaagggagggcttgggactcctgtctttccagcatgccctggggtgcagtggtcagccacctgaagagagagccaatagcatggggtttacaaggcaaagatagtcattcattcaacacatattcatagagctccttctctgtgccagacactgttctggaagatagctagatgaaaatctttgcactcacagagcttacatgccagtgagtgaagatcgatgataaataaagcaaatgcatcatatgttcacatttgataagtatatgccaaaaaatgaagccgggaaggaggacaaggcccatgggtgggtgttgaggtttttaaagtgtggtcaggaaaggccccactgataaggtaacatttgagcaagtctgaaaaaggcaaggggatctttggggctaacttcgggatccctgcactttatgtaagaatgtaaacctggagtctcatttaagaatgatcagcaatacgtttagaacatatgaactgaatgaaatggacattttttcttaatttatgtataaatccatatgattatacataaagttctgatgcattaataaaagcagccaaatagggccaaagagaaaaataacaggactctgtactggacctaactttatcattaattaggtaatattttcctcatttctttactgctgccattttcctcaccagtattccagagatggtcatagctcattactctaccaccaagaacctaaaaggaattagaatacagcagaattggcctcagtgaagagcttaaaattgttctcctcgtagaactggactattgatcattaccacgtgacgttggctctattactttctgttcccaatgtccttctagtggtttgaaaatgttaaaacatccctaaaatctaaatcatataatcagaattctatagtgtcccactctatctgtaaagatcatttggaagactttagactctattaattttaaaaggaatatttattagccatatgcagaatttctaatgatgatattgtacagcttctaattcacttttcagatcagtgtttgaaatggcaattatcagtgttggatttagttccaactacttgatttacaaaaatgtacatttagaggttaaaagaaacagtgagaaatgtaaacattcaaaatgataattgaatctctcagttgtgggaataattatcagagacatgcaactgaaaatgtctcacctttcatctttttttcttaattcataaagttatcttgtagaatttgatgagaccctccctagtcattctcaactggggcggtgctgtcaccgaatggtgtttgagagtgttggggctagggcacatttttggttgtcacagcaactggggtggcatttgctgcccagtgccaggaatagtaacattatgaatgccagggacagtgtgctcagtaaagtcttccatccaaaaggggcagggcacggtggctcacgcctgtaatcccagcactttgggaggccaaggtgggcggatcacctgatgtcaggggttcgagaccagcctggccaacatggtgaaaccctgttgctactaaaaatacaaaaattggctgggtgtggtgtcacatgccagtaaccccagctactagggaggctgaggcaggagaatcacttgaacccgggaggcagaggttgcagtgagctgagattgcaccactacactccagcctggatgacagagtgagacttcatctcaaaaaaaaaaaaaaacaaaaaaaaacaacccggtagcattgtcccttccccactgacaaacttatcaaatccagaagctttagagtttcgtctctaattatttttctcctgaacaaaattacccaagtcaaaacaaaatgtatttttagaattacggcagcatacgacctgaattttgtgagtttcgtggctttatcttaaatcaccatttccctaaaaatggtttctttctccttagaaatgctggtggcaacttgatgaaacagccaaatgcaccagggcaggtcactttcccattacactgattccacaattaaaaaaaaaaaagaaaaaaaactcattgagatagctacagttctataggttaatttaaagcctcctttttctactcatttttgaaagcaaaattacattttactattttacataaccagtgaaaagacgttgaaagcctacagctcactgtttttggtgctctggaaatgttgagggtgggtttttaaccagtgatttttaacgtgcagtgaatttgttagacttttaaacaccagctaaggtagtcaaacttgatccccattaaaaatcaaggaattaggggtcgggggagggtttaggagtgatccagaatgacctcccagaattactgtgcgtacaactttatttttcagagttttcattggaatggtaagagttttatgaaagacagttttaaaacttattctgagttaaatattaatactttaaaaaattattgtactagacttattgcagccttttgaaagtagcagagtttcatcataccacatatataacagagcataaattttctataatcaggcaccttttgctgcttttgagtaagactgttttcctgtttaagtgttaagcatcgccagacataaaaatctattctctcctctcgattgtagcatagcctgacagctctagatacagcatttctatgatgaaaaatgagtatccatcaggaaatctagaagactagccgtgttttctcagactccacctttgtttgcactctgttgcctgtgaggagctttctggcatgtgattatttacttcaaaactagagttccaagcacctacattaattattttatattgtgtgcagaatagtatatcttttaatgtcagatatgatacactgcacatattgcttttgcactcttaaaatttttgtactaaataatagaaaatatttatattctttgagtgtgagctttgaatagatggcattatcactttattgtttttttaacaaaaactttttctcaattattctattgcaatgttattctgagcaagtcctatgccaaatatcttgtataatgtttgtatggaagattaaattttactcttgtgtggtaagactatttcagttactgattttatagttggaatttgatattccagcacaaagtccacagtgtattcagaaatccaagttggtgtcatacatttcattttgatgtgaacttttctttgctttcctttgttctaagactccattttgcaataaacgttttgacagtaaaaaaaaaaaaa

SEQ ID NO: 2456 - DNA, 2450 bp, Homo sapiens
aataggttagtttcagacaagcctgcttgccggagctcagcagacaccaggccttccgggcaggcctggcccaccgtgggcctcagagctgctgctggggcattcagaaccggctctccattggcattgggaccagagaccccgcaagtggcctgtttgcctggacatccacctgtacgtccccaggtttcgggaggcccaggggcgatgccagaccccgcggcgcacctgcccttcttctacggcagcatctcgcgtgccgaggccgaggagcacctgaagctggcgggcatggcggacgggctcttcctgctgcgccagtgcctgcgctcgctgggcggctatgtgctgtcgctcgtgcacgatgtgcgcttccaccactttcccatcgagcgccagctcaacggcacctacgccattgccggcggcaaagcgcactgtggaccggcagagctctgcgagttctactcgcgcgaccccgacgggctgccctgcaacctgcgcaagccgtgcaaccggccgtcgggcctcgagccgcagccgggggtcttcgactgcctgcgagacgccatggtgcgtgactacgtgcgccagacgtggaagctggagggcgaggccctggagcaggccatcatcagccaggccccgcaggtggagaagctcattgctacgacggcccacgagcggatgccctggtaccacagcagcctgacgcgtgaggaggccgagcgcaaactttactctggggcgcagaccgacggcaagttcctgctgaggccgcggaaggagcagggcacatacgccctgtccctcatctatgggaagacggtgtaccactacctcatcagccaagacaaggcgggcaagtactgcattcccgagggcaccaagtttgacacgctctggcagctggtggagtatctgaagctgaaggcggacgggctcatctactgcctgaaggaggcctgccccaacagcagtgccagcaacgcctcaggggctgctgctcccacactcccagcccacccatccacgttgactcatcctcagagacgaatcgacaccctcaactcagatggatacacccctgagccagcacgcataacgtccccagacaaaccgcggccgatgcccatggacacgagcgtgtatgagagcccctacagcgacccagaggagctcaaggacaagaagctcttcctgaagcgcgataacctcctcatagctgacattgaacttggctgcggcaactttggctcagtgcgccagggcgtgtaccgcatgcgcaagaagcagatcgacgtggccatcaaggtgctgaagcagggcacggagaaggcagacacggaagagatgatgcgcgaggcgcagatcatgcaccagctggacaacccctacatcgtgcggctcattggcgtctgccaggccgaggccctcatgctggtcatggagatggctgggggcgggccgctgcacaagttcctggtcggcaagagggaggagatccctgtgagcaatgtggccgagctgctgcaccaggtgtccatggggatgaagtacctggaggagaagaactttgtgcaccgtgacctggcggcccgcaacgtcctgctggttaaccggcactacgccaagatcagcgactttggcctctccaaagcactgggtgccgacgacagctactacactgcccgctcagcagggaagtggccgctcaagtggtacgcacccgaatgcatcaacttccgcaagttctccagccgcagcgatgtctggagctatggggtcaccatgtgggaggccttgtcctacggccagaagccctacaagaagatgaaagggccggaggtcatggccttcatcgagcagggcaagcggatggagtgcccaccagagtgtccacccgaactgtacgcactcatgagtgactgctggatctacaagtgggaggatcgccccgacttcctgaccgtggagcagcgcatgcgagcctgttactacagcctggccagcaaggtggaagggcccccaggcagcacacagaaggctgaggctgcctgtgcctgagctcccgctgcccaggggagccctccacgccggctcttccccaccctcagccccaccccaggtcctgcagtctggctgagccctgcttggttgtctccacacacagctgggctgtggtagggggtgtctcaggccacaccggccttgcattgcctgcctggccccctgtcctctctggctggggagcagggaggtccgggagggtgcggctgtgcagcctgtcctgggctggtggctcccggagggccctgagctgagggcattgcttacacggatgccttcccctgggccctgacattggagcctgggcatcctcaggtggtcaggcgtagatcaccagaataaacccagcttccctcttgaaaaaaaaaaaaaaaaaaaaa

SEQ ID NO: 2457 - DNA, 1468 bp, Homo sapiens
tgcatgctccagggacggcacccttgtctggggcaggtgcttgtgggggctgaggctgccttgctccccacacccctgcccctgacctgggagtgtaccgctgtgtgtgcccagcacgcataacgtccccagacaaaccgcggccgatgcccatggacacgagcgtgtatgagagcccctacagcgacccagaggagctcaaggacaagaagctcttcctgaagcgcgataacctcctcatagctgacattgaacttggctgcggcaactttggctcagtgcgccagggcgtgtaccgcatgcgcaagaagcagatcgacgtggccatcaaggtgctgaagcagggcacggagaaggcagacacggaagagatgatgcgcgaggcgcagatcatgcaccagctggacaacccctacatcgtgcggctcattggcgtctgccaggccgaggccctcatgctggtcatggagatggctgggggcgggccgctgcacaagttcctggtcggcaagagggaggagatccctgtgagcaatgtggccgagctgctgcaccaggtgtccatggggatgaagtacctggaggagaagaactttgtgcaccgtgacctggcggcccgcaacgtcctgctggttaaccggcactacgccaagatcagcgactttggcctctccaaagcactgggtgccgacgacagctactacactgcccgctcagcagggaagtggccgctcaagtggtacgcacccgaatgcatcaacttccgcaagttctccagccgcagcgatgtctggagctatggggtcaccatgtgggaggccttgtcctacggccagaagccctacaagaagatgaaagggccggaggtcatggccttcatcgagcagggcaagcggatggagtgcccaccagagtgtccacccgaactgtacgcactcatgagtgactgctggatctacaagtgggaggatcgccccgacttcctgaccgtggagcagcgcatgcgagcctgttactacagcctggccagcaaggtggaagggcccccaggcagcacacagaaggctgaggctgcctgtgcctgagctcccgctgcccaggggagccctccacgccggctcttccccaccctcagccccaccccaggtcctgcagtctggctgagccctgcttggttgtctccacacacagctgggctgtggtagggggtgtctcaggccacaccggccttgcattgcctgcctggccccctgtcctctctggctggggagcagggaggtccgggagggtgcggctgtgcagcctgtcctgggctggtggctcccggagggccctgagctgagggcattgcttacacggatgccttcccctgggccctgacattggagcctgggcatcctcaggtggtcaggcgtagatcaccagaataaacccagcttccctcttgaaaaaaaaaaaaaaaaaaaaa

SEQ ID NO: 2458 - DNA, 2555 bp, Homo sapiens
ggggcagccatgtcgccattgtctgcggcgcgggcggccctgcgggtctacgcggtaggcgccgcggtgatcctggcgcagctgctgcggcgctgccgcgggggcttcctggagccagttttccccccacgacctgaccgtgtcgctatagtgacgggagggacagatggcattggctattctacagcgaagcatctggcgagacttggcatgcatgttatcatagctggaaataatgacagcaaagccaaacaagttgtaagcaaaataaaagaagaaaccttgaacgacaaagtggaatttttatactgtgacttggcttccatgacttccatccggcagtttgtgcagaagttcaagatgaagaagattcctctccatgtcctgatcaacaatgctggggtgatgatggtccctcagaggaaaaccagagatggattcgaagaacatttcggcctgaactacctagggcacttcctgctgaccaaccttctcttggatacgctgaaagagtctgggtcccctggccacagtgcgagggtggtcaccgtctcctctgccacccattacgtcgctgagctgaacatggatgaccttcagagcagtgcctgctactcaccccacgcagcctacgcccagagcaagctggcccttgtcctgttcacctaccacctccagcggctgctggcggctgagggaagccacgtgaccgccaacgtggtggaccccggggtggtcaacacggacctctacaagcacgtgttctgggccacccgtctggcgaagaagcttctcggctggttgcttttcaagacccccgatgaaggagcgtggacttccatctacgcagcagtcaccccagagctggaaggagttggtggccgttacctatacaacgagaaagagaccaagtccctccacgtcacctacaaccagaaactgcagcagcagctgtggtctaagagttgtgagatgactggggtccttgatgtgaccctgtgatatcctgtctcaggatagctgctgccccaagaaacacattgcacctgccaatagcttgtgggtctgtgaagactgcggtgtttgagtttctcacacccacctgcccacagggctctgtcctctagttttgagacagctgcctcaacctctgcagaacttcaagaagccaaataaacattttggaggataatcaccccaagtggtcttcaaccataaactttgtgattccaaagtgcccagttgtcacaggtgccataaataattacattttccaacataaatgtgccattttccttgccgcgttaatacaactgagtacaaaagttccaagagagatgctctcttttcaggggctgcaatgtcctctctgagacctagtggtggatgaggtctcctgtttgattttgttcctgcactcactcatttttccagagacccagctgtgattcacaggtgtcagacatgggaggtgtgagccttgcttgctacagcctgtaggatgagtttgacgtggccagcagcaccatctggtcaacctcattccagaatggcacagtcacaagtgaagcatgccactgtcaaatccgagaatgtaaaccgctgaacagctatggatcaaatggtagccctcaaaagatatgttcatgccctaaccctcagaacctataaatattactttatttggaaaagaatctttgcagatagaattaagaattttgagatgggtcattatggatcatcccagtgaacctaatgccatcacgagggttcttatcagagacaggtagagggagatttgagtacagaagacaagatattcgtgtgatgatgcagacagagactggagtgatgccaccacaagccaagcaatgcctggagccaccaggagctgggacaggcaggaaggattctcccttatacccctcagagcaatcttggcccctctgacgtcttgactttagacttctggtccccagaacggagagagaataaatctttcttgttttaaggctccaacaaattggtagtcacttgttacagcaaccacaggaaatgtatacagcttctgatacttctgaaaacctcacacagccaaagggtacatccttggtatagaggctcactcttactcaccagccaggcaaggaaggctcaatcctttggtgttagagagatagatgttgggttttcaaatttcaacatagagaaatcagtcatttgcaatgcttttgagaaagtactgtgtataccctacgagcctgcactccttatgtgtgagactgatgaccattggttggcttattatccattccactaagtgacaaaatcccactgactattcaaatccaggctcctggcatgcctgtaccttagaatcacaaccagctgcaattccaggatggagttcaaactaattgtgggggcatgtgcttcttacatgactgctagattgttcccagatggggaaggttgccctgataagcaacttaaatgaaaataataaatgtattgtttggcctctttaaaaaaaaaaaaaaaaaaaaaaaaaaaaa

SEQ ID NO: 2459 - DNA, 6897 bp, Homo sapiens
gtccggcggcgtcgcgggcggcgggcggcggggccgcgggaggggcgcgggggcagacaaagccgcggtaatgaatggagcgtccgcccgcgccgccgtcgtccgcagccggccgggagccgccccagaggccgggccgaggtaatgcacaagggtcacgtgtatgctctcaagatgatcaggcagatcctgtcctcaggaccagaagcacgtctctgctgcacacattgttgtctacaccatgagtgtttagtagcaggactcttggaaagcagtgatctatgctgtaagaccatgagtcacagattctttttttcagtactatttatgattagccatatttctagaaacatcctgaaagatggaattatgacgaaaaagtgaagataatctacattcgggggcacaaatgagcacttggatcagtgttttatgaacctaagatacagccggagtagttatggtcagtcatggagaataacttgaaaacttgtcccaaagaggacggtgatttcgtttctgataaaataaagtttaaaatagaagaggaagatgatgatggaattcctcctgatagtttggaaagaatggactttaaaagcgagcaggaggacatgaagcagacagacagcggtggggagcgagcgggcctcggtgggacgggttgcagctgcaagcccccggggaagtacttgtctgcagagagtgaggatgactatggcgcgctgttctcccagtacagcagcaccctatacgacgtggccatggaggccgtgacccagagcctcctttccagccggaacatgagctccaggaagaagtctccagcctggaagcatttttttatctctccccgagacagcactaaagcaatatgcatgtactgtgtgaaggagttcagcagaggcaaaaacgagaaagacttgagtaccagttgtctcatgaggcacgtgaggcgcgcacacccgaccgtgctcattcaggaaaatggcagtgtgtctgccgtgtcctcgttcccctctccctcactcctgcttccaccacagcctgcggacgcgggtgacctcagcaccatcctctcacccatcaaacttgtccagaaagtggcgtctaagatcccgtcccccgatcgaataacagaggagtctgtgtctgtagtttcttctgaagaaatctcctctgacatgtccgtttcggagaagtgcggcagagaagaagccctggtggggtcgtctccccacctccctgctctccattacgatgaacctgcagagaacttagcggagaagagccttccacttccaaagagcacctctgggtccaggagaaggtccgctgtctggaagcacttctacctgtcgccactggacaactccaaagctgtctgcattcactgcatgaacgagttcagccgggggaagaatgggaaggacctgggcacgagctgcctcatcaggcacatgtggagggcacaccgcgccatcgtgttgcaggagaacgggggcacgggcatcccgccactgtactccacccctcccactctgctgccttccttgctgccgccggagggggagctcagctctgtgtcctcgtctccagtaaagccggtcagagagtccccttcggcctcctcctcccctgacaggctgactgaggacttgcagtctcacttgaaccctggagatgggctgatggaagacgtggcggccttctcatcttccgatgacataggggaggcctcggcgtcctctcctgagaagcagcaggctgatgggctgagtcctagattgtttgaatctggcgccatcttccagcagaataaaaaggtcatgaaaagactgaagtcggaggtctggcatcacttctccctggcccccatggacagcctcaaggccgagtgtcggtactgcggctgtgccatcagccgggggaagaagggtgatgtgggcaccagctgcctgatgagacatctctaccggcgccatccagaagttgtcgggagccagaagggcttcctgggtgcaagtctggcaaactctccgtatgccactttggcctctgcagaaagttcctcttccaaattgactgacttgccaacagtggtcacaaaaaacaatcaagttatgtttcctgttaatagcaaaaagacctcgaagctgtggaatcatttttctatttgctccgcagactccacaaaagtcgtgtgcttgcactgtggccggaccatcagccgggggaagaagccgactaacttgggtaccagctgtcttctgagacatttacagcggttccatagcaacgtgctgaaaactgaggtctcggagacggctcggccctcctctccggacacccgggtgccgcggggcacagaattatcaggcgcttcctcttttgatgacaccaatgagaagttttacgattctcacccagttgccaaaaaaatcacaagtctcatagctgaaatgattgcacttgacctccagccatattcttttgtagacaacgttggctttaacaggctgcttgaatacttgaaacctcagtactccctccccgccccttcctacttctccaggacagctatcccaggtatgtatgataatgtgaagcagataattatgtcccaccttaaggaagctgagagtggtgtgatccacttcacgtctggaatatggatgagtaaccagacccgtgagtacctgaccctcacggcccactgggtttccttcgagtcgccagcccggccgcgctgtgacgaccaccactgctcggcgctgttggacgtgtcgcaggtggactgcgactacagtggcaacagcattcagaagcagctggagtgctggtgggaagcgtgggtgacctccaccggccttcaggtgggcatcaccgtcaccgacaacgccagcatcgggaagacgctgaacgagggggagcactcgagcgtgcagtgcttcagccatacggtgaacctgatcgtcagcgaggccattaagagccagcggatggtgcagaacctgctgagcctcgcccggaagatctgcgagcgggtgcaccggtcgcccaaggcgaaggagaaactggccgagctgcagagggagtacgcgctgcctcagcatcacctcatccaggacgtcccgtccaagtggagcacttccttccacatgctcgagcggctcattgagcagaaaagggccattaacgagatgtccgtcgagtgtaacttccgagagctgatcagctgcgaccagtgggaggtcatgcagtccgtgtgccgtgcgctaaagcccttcgaggctgcgagccgggagatgagcacgcagatgtccaccctcagccaggtcatccccatggtacacatcctcaacaggaaggtggagatgctcttcgaggagacgatgggcatcgacaccatgctgcgctctctgaaggaggccatggtgagccgcctgtctgccaccctccacgacccgcggtacgtcttcgccacgctgctggatcctcgctacaaggcctccctgtttacggaggaggaggcggagcagtacaaacaggatttaatcagggaactcgaactcatgaattctacctcagaggacgtggctgcctcccacaggtgtgatgctggctccccgtcgaaagactctgccgcagaggagaacctgtggtcacttgtggccaaggtgaagaagaaagacccaagagaaaagctgcctgaagccatggtgcttgcgtatctggaggaggaggtgcttgaacacagctgtgacccgctcacctactggaacctgaagaaggcgtcctggccggggctgtccgcgctggccgtcagatttttgggctgccccccaagcatcgtcccttcagaaaagctgttcaacacacccactgagaacggtagccttggccaatccaggctcatgatggaacattttgaaaaacttatctttttgaaagtgaatcttcccttaatatactttcagtattgaaactcacgacggcaccactaggccagaggcgtggctgccccagcgttagcagcctgtaccaggtctatgacccgctctgcccacggctgtgtacgacatcagaccaggcactctcagggccgctctccagctcaccacagtgtctccacgtgccttaccccttctccttcaggccaagtttcgcggggtgttttattaagacgtccactagaaatagcttgtcctgtcaactatgaaatatggtgactagattttaattcataaccgtaaagttttttaaagttttgggttagtaatttgttttactagaatgacaaagaagatgtaaaccattttattctgtaggctttttactcaattatgtacaaaccacaaatcaggtactgtattttagtgaagcattgctttaattgcaacagaatagcttttgtggctatcaaatgaaatctgtaaataggaggtggagggcaagccatcctgactgagcagtttttaaccgcaggttctaaagtgtcccgcggagtacagataatattctggaaggtaactgtttactacgacagagacgtggcatttggaaacgaaacttagatgtttcatggagcttattttgagaactttcccatttcaggtttctgcattcaggctttacatggtcagttaactcagagataccccagctgtttatcatcagctcctctgaaatgtgatccctttgtaactgtgctcatcacttcgccagtgcgttcaatgacacgctgatggcaggtggtccctgctgaaacccccacgcctccgcttcagcatctccacgctctgaagctgtctttcaaaatgtgtgcactgacccccttgtttgatcaaatttgtgtaaaatttttttagaagagatggcttattaacagggaagaagcttgttatattccagttgtaagaatagccttagtgtttagatttttttatgatagggaagatgcggccatcactgggatattttcaaatcccaaggacatcagagtgaagtgtcagttgtcagatgattttaaaagttatgtcttcagagaaaaaaagattcattttctcattttaaaccaattaaatattctgagtgagactaatcactcatttgcctacgaccttttagaaaagttgttttgttgaaatactgtacgtacgcttaatctaaatttgcattgactatgttttagtgtatttataaatggtgaactcagtttctgaaattaaacttcttatttgcaattttctagtgctggcagacactggctttttatttttaggataagaaaacaggcatattctttgtggtccattatctagagcccatacttgggcagcatttgaaatttcaccttaaccccagacagggctccagggaagtggagatgtaattcttacaacaacagttctgatcatggccatggtgatgactttccaggtctcgtgttcaagtggtgccagaatgcaggagccggtgggcagccctgaggggttgccttggccgcagcctctgtgcacgctcttcctggtgtcctcttacccggtagctgtgcgcttgttcccgtgagaacagcctgcttccagagtgcccaggagtgctggtcagggacagtgcccgtgaggctgcagaggaggtggggtccatggcccacccatctctccctcgccagcagccctggccagtgtcatcctggtgtagaaagggttgcgcacaggataggagggagccacagttcttgcttagctgtgctcacgaccagcttgcagtcctgtgtttcttaagattgtatttggaatggtaatatccttagaattttgggatattgagcttcatggattttctctccaaaacaagccagcacaactaactgtagcagaattgtatccactcattcattcaactgagatgaagtgccctcccttttccagggcctgggctagttcctggaatgcaacagagatttccgtggacacagtctctagtctcacagagcatatagtctagtccacgattggcaagctgcaaccacagacccagtccggcactctgcccatttttctaagtgaaattttcttggaatacagtcacagctgtttttttaacatggtgtcttggctactttcaggctgcgacgggagaactgaatagttgtgacagagaccacaggcccactgaaagggacaaacagggctgaaaatactcactgtttggccctttccagaatagcaagtttgctggcccttgagctagcctgcctttatggggttttttttgtttgtttttttaagctttcagcttcatgctgctgtatttttagttgaagtgttctgagtaacagtcagtgtataaaaggggattgcagaaaaaaatgagggcttgctttactcaacagaaaatatggcccttcctgaatgacactaggagagtcattttatctcatacattcccttcatttcgttggtggacatttgttgaaaccggcactcaatggtcaaaccgtctctgccctccagttgctgacagtcctgcaggaagatggacaagaggcccagtgctgacagtcacacgactctcactacttgaatgaggggactgtgggtgcaactagaaaatatgttgattcttagccattcccaccttgcctctccgttcagaaccccagctgcgagctgtttgtttccctgcctggaaatgatgttttaggcaggttccttaatttctcaggtctgtctcagataataaaaagctctttgtatgagcctcagaactgtctcttcagtgaatgaaattaccagtcattatacgaagggactttaaaaaatttgtggaaatactgaagtaaaagatgataaaaaaataaaaactttatttcttggctgggaaaaaaaaaaa

SEQ ID NO: 2460 - DNA, 4631 bp, Homo sapiens
gcgaactggctggaggagctaggggactagaggcggggtgggaggggggcgggtggaagggggaggaagtcccgtaacggagacgctggtcaggacgttcccacctcctctgacactgccgagtccgatcggagaggggtcaccgcctccttcagcgaggaggaggggggcggagcccgactcaggatcatggattttcctggtcactttgaacaaatcttccagcagctgaactaccagagacttcatggccagctctgtgattgtgtcattgtagtggggaatagacactttaaagcccaccgctccgtgctggcagcatgcagcacgcatttccgagccctgttctcagtggcagaaggagatcagaccatgaacatgatccagctggatagcgaggtggtgacagcagaggcctttgctgcactgattgacatgatgtatacctccaccctcatgctgggggagagcaatgtaatggatgtcttattggcagcctctcacctgcatttgaactctgttgttaaggcatgtaaacattacttaacgacaaggacgctgcccatgtctccccccagtgagcgcgttcaggagcagagcgcccgcatgcagcgctcctttatgctacagcagctgggactaagcatcgtgagctcagccctcaattccagccagaatggcgaggagcagccagcccccatgagctcttccatgcgcagtaacctggatcagcgcacgcccttccccatgagacgccttcataagcgcaagcagtctgcagaggagcgggccaggcagcgcctccgaccctccatagatgagtctgccatttcagatgttacaccggagaatgggccttcaggggttcattctcgggaggagttcttttcaccagattctctgaaaattgtggataatcctaaagctgacggaatgactgataaccaggaagatagtgcgatcatgtttgatcagtcttttggcactcaagaagatgcccaggtgcccagccagtctgataacagtgctggcaacatggcacagttgtccatggcctctcgtgcaactcaggttgagactagttttgatcaggaagctgcacctgagaaaagtagttttcagtgtgaaaaccctgaggttggccttggtgagaaggagcacatgagagtggtggttaaatctgagcctctgagctcacctgagcctcaggatgaagtgagcgatgtgacctcacaagcagaaggcagcgagtctgtggaagtggaaggagttgtggtcagtgccgagaagatagacctcagccctgaaagcagtgatcggagtttttcagatccccagtctagcacagacagggtaggtgatatccatattttggaagtcacaaataacctagagcataagtccacttttagtatttcgaattttcttaacaagagcagaggaaataactttactgcaaatcagaacaatgatgataatattccaaacaccactagtgactgcaggctggagagtgaggccccctatttgttgagtccagaggctgggcctgcaggtgggccctcctctgcccctggctcccatgtagagaacccatttagtgaacctgcagactcccacttcgtcaggcctatgcaggaggtgatgggcctgccgtgtgtgcagacttcaggctaccaaggaggagaacagtttgggatggacttttccaggtctggtttgggcctccactcctccttctccagggtaatgataggttccccaaggggaggagccagtaactttccttactaccgccgcatagctcccaaaatgccagttgtaacttccgtcaggagctcacagatcccagaaaactctaccagttctcagctaatgatgaatggagctacgtcctcatttgaaaatggccatccttcccagcctggccctccacagttgaccagggcatctgcagatgttctgtcaaagtgcaagaaggccttatcagagcacaatgttttggttgtagagggagctcgcaagtatgcctgcaaaatctgctgcaaaacttttctgactttgacagattgcaagaagcacatccgtgttcacacaggtgaaaagccttacgcctgcctgaagtgtggcaagaggtttagtcagtccagccacctgtataagcactcaaagactacctgcctgcgctggcagagcagcaatcttcccagcactttgctctagctgtttgtccttacaagacaacgctgaggccagttgtcagactgaatttcttttggtaagcagttaatgcctttgggttcgaggcttccagctgcccagtggctcttaaacagtttagcaactaataaccggagaactaacatgtagtatttgtgctgctgcatttctgagtgaagtgcacgtcttgggaaagggatgcaatccctgaaaccaggtgcttccttggggttgagtaatgcagtcagaaagtagtttgtaattgatattaaaagtggcacatttaaaaatttaaaaattgaagtgcaaaaaaaattttttagcaatttttgtaaaactgtgtagcatttaaatttcctataccttctgatgggagtattatatccctgtatagtgatgcaaaatgcacttatgtgtaaccagtggtgatttggtgcctgtcttaaaggaaggcctttgaggacacacctgtctgccacaaatgctttaaagtgtatcatgagctagtcctaggcctcaaagtactgtattttttatttttacctgatttgcagtcataaacactgcactttggtgctgacactgggtccagagtgagcattctcttggactattagatgtatatacttttgaatacatcactgttggatagatgttttaacagttttttctggtttaaaaaccaaattgtaaatggagtgtgtacttgtagagagtgacaaggtattgtttgtttccctatgtgctgtttgagcagtattttaaccaacttgtattacagatgttacagttccatgttaggaagtcagaaaagacttgtgtttgtctttgttctgctgatgtggagtcatgttttgtggggtcttccatggcacatttacctgttgctccgtccagatgttgagggccagtctaggctgacacatcctacccgaggacaagcctgttctccatttcttcactctcccctccccatatagcaactctcccaggtttagattaccgttttcgacgacagattaaccaaaaatgccccacacaggttttattactgttatatactatacttttaacagtacagaccctaaattttattatttgttgctcccccaatctgataccaaatgtttaaagttgtttgaaatccaaacatggtagtgttcatgggtaaatattttctaggctatgtaagagttagcagcccatagcatagaagtaatcaagtagcatctgagactgttggaggcactagggcctctctgggccctacagcctcacttccccagcctcaccttgctgtcctctgacactgccatcagggctgttagtggcacctgtatgaggccaagtgtgcgtccaggggaacagcacaggttaatgcgtctccctagaactcatgaagtcagtttaattcatgcatgaacatgagttcattttatgttttatatagctttcttagacataccaaaccatcattcataaatcagataaattattcagtttttgtgtttagaaagctaagtatgtgtagctggaaacaaaaatgagcgtgttttctctcctgttaatctagagtgtgcagttacacatgtgtggataatttcatgttccaggggcgcttggcatctcccatggactgattcccaggaagaaaagcccaaagggaaacccacgattcctttcgagtagatgtgggaaagagcccattggaggatatgaggtcctgtgaaattcagttgtgtgtgtggctccttgttagcagtcatgttgacatggtgttaggaggctccccatccaccctttacatgatgtagggaccagtgtcttgtgagattaaccttgggacacagtgggttagcctggagaaaatgagaggccctgcctggacccagggagaggagccagtgacacaggcagagcggtgcagccctccttcccttccatttggaggaggtggtgccaggagcctgcccgcttacctctgctgaagcataagtggactttgcttttggggcttatctctgatacatgctggagccctgcctctccactgctagatggaacctggaatctctcatctacctcttagtctgtcagtttctacgtgtgagaagcaagcttgtgggccagtgtccttgtacatgctgtagcacttaaaaaataattccagggttccctggaaaaccagtcccagggttcctatgatctgtagtttctacctggattataactggttttgggtacctgaattttgattggttagccttaattatagtctggcgtgatcatgtagaatcttttctggtgaacagatcataaagttctatcaaggagttctatcaaggcatccatgtcagtggtgctatgctggttacaacttgagatttttgaaataaaaaatttgtcatatt

SEQ ID NO: 2461 - DNA, 2356 bp, Homo sapiens
cgccgttttcccggggagatgcgccgcccggtctccctgccagcggagtgctgggccgaggacagggcggcaggggtgacagtggggtccaggagagtctcaaaatcctaagctttcagtatttgttattgtgaaagaagttaattcacctgaaacagaggaggggcaacctgagttatcagaaagtgacttcctggccttcccttctttactgatcagaggcacacaaagcgtagtttctaagctgaatgatgacaacgttgcagaataaagaagaatgtggaaagggaccaaagagaatctttgccccacctgcacaaaaatcttacagcctgttaccttgtagccctaactcccctaaggaggagaccccggggatcagttccccagagacagaggccaggataagcctgccaaaggccagtttaaagaagaaagaggaaaaagcaaccatgaagaatgttccaagcagggaacaggagaaaaaaagaaaggcacaaatcaacaagcaagcagagaagaaagaaaaggaaaaatcaagtcttaccaatgcagaatttgaggagattgtccagattgttctgcagaagtcccttcaggagtgcttggggatgggatctggccttgattttgcagagacttcttgtgcccagcccgtagtatctacccaatcagacaaggagccaggaattactgcttctgctactgatactgataatgctaatggagaggaggtaccacatactcaagagatttcagtgtcttgggaaggtgaagctgcccctgagataaggacatctaagttaggccagccagatcctgcaccctctaagaagaaatccaatagactcaccttaagcaaaagaaagaaggaagctcatgagaaggtggagaaaactcaaggtggacatgagcacagacaggaagaccgactaaagaaaacagttcaggatcattctcagatcagggaccagcaaaaaggagagataagtggttttggtcaatgtctggtctgggtccagtgttccttcccaaactgtgggaaatggaggcggctgtgtgggaacattgacccctcagttctcccagataattggtcctgtgatcagaacacagatgtgcagtataatcgctgtgatattcctgaggagacctggacagggcttgagagtgatgtggcctatgcctcctacatcccaggatccatcatctgggccaagcaatacggttacccctggtggccaggcatgatagaatctgatcctgacttaggggaatattttctttttacttcccatcttgattccctgccgtctaagtaccatgtgacgttttttggagaaacagtttctcgtgcatggatcccagtcaacatgctaaagaacttccaggagctgtccctggagctatcagtcatgaaaaagcgcagaaatgactgcagccagaaactgggggtggccctgatgatggctcaagaggcagaacagatcagcattcaggaacgggttaacttgtttggtttctggagccgattcaacggatctaacagtaatggggaaagaaaagacttacagctctctggtttgaacagcccaggatcctgcttagagaaaaaggagaaagaggaagagttggaaaaggaggaaggagagaaaacagacccaattttgcccattcgtaagcgagtcaaaatacagacccaaaaaaccaagccaagagggcttgggggtgatgcaggcacagcagatggccgaggcaggacactgcagaggaagataatgaagagatctctaggcaggaaatccacagctcctcctgcacccagaatgggaaggaaagaaggccaagggaattcagattctgaccagccaggccctaagaaaaaatttaaagctccccagagcaaggccttggcagccagcttttcagagggaaaagaagttagaacagtgccaaagaacctgggcctatcagcgtgtaagggggcctgcccctcatctgcgaaagaagagcccagacaccgggaacccctgacccaggaggctggaagtgtcccccttgaggacgaagcctccagtgacctggacctggagcaactcatggaagatgttgggagagagctggggcagagcggggagctgcagcacagcaacagtgatggcgaggacttccccgtggcgctgtttgggaagtagctggtgctcctctgctccctctttttctcccttctctggggcgcaggagggagaagttgctaagtgctgggtctgttcattggctatgaggttcaaatgtgtgtggtgcagtttctgtgttaataaagcaggttacagtcgaaaaaaaaaaaaaaaaaaaa

SEQ ID NO: 2462 - DNA, 4582 bp, Homo sapiens
gagacccggcactgagggcaacggccgcgcgccggctccgagacgagcgacgcctggcgggagcgcgcggcagcggggcgggcgtggagcgtgcgggggccgcgcgctgcttctctgaggcaggacggcactgccgggaggcggcggtgacaacgacggcggtggtgacgggcaccgggctcgcgggtgagacacagtaacctggttgaactctgcatctggaaagctgaagactgaagaaagataagagacattgactagtctggaaacagggacatctttggaacttcgttttcatccacagtaaacttttgaagtgtcatcaattggaattgatttcttcatcttattctgcctattgggaagaacatggcttcaaggattttaagtttccctttagttttacatgaactttgtaggaaacagagcccttaaagggcttgggaataacaagaagagattgaagacagagaagcttgccctgttttccttgccccttcaaagaaaaggatttacagctcaaacttagaacagctgttgtccagctttagccatcaagagagaaataaattaaaccaccattgccagactacaagccctggtgaagtcagggtgtgggagtggtggcattgagaagactacctaaaagagacaaagactgcagtaaacaaagctcctctttaaagttggaaggggcctcaggttccttcttggattgaaatagaaatagaaacacagggcacacctcttttaggtgcagctcacattttatggaactgtagtcgtggaggtactatagtatctcagaagaatttttctttgcccaaagtttttttgccataccctgatattctctccttcttttgaagacctgcctccatccatgagctgtatcttgatctgtctgactgtccatgttttccacctgcaaccatttgcatgtgtacagcctactgtttgtctccagtttttaaactgtacaagttgtgtttcttaatcttcccttctgccttgttctggggaggtggttattcatcatttggaatcacctttccccctcccatgtgctttccttcatttgagatcttttgacctttggctttatttgggagggggaagggtgataaagttttctgtttccctggttttcttttgtactcctctctgttgcttccctcctcccattttcttgtctgttctgccgctgtgtgggcctgggctatgcggcagggcagatttcccatcagagctccaacatgcccgcagagtctggaaagagattcaaacccagcaagtatgtcccggtctctgcagccgccatcttcctagtgggagctacgacactcttctttgcctttacgtgtccaggactaagcctgtatgtgtcacctgcagtgcccatctacaatgcaattatgtttctctttgtgttggccaacttcagcatggccaccttcatggacccagggattttccctcgagctgaggaggatgaggacaaggaagatgatttccgagctcccctttacaaaacagtggagataaagggcatccaggtgcgcatgaaatggtgtgccacctgccgcttttaccgtccccctcgatgttcccactgcagtgtctgtgacaactgtgtggaggaatttgatcatcactgcccctgggtgaataactgtattggtcgccggaactaccgttattttttccttttcctcctttccctgacagcccacattatgggtgtgtttggctttggcctcctttatgtcctctaccacatagaggaactctcaggggtccgcacggctgtcacaatggcagtaatgtgtgtggctggcttattcttcatccctgtagctggcctcacgggatttcacgtggttctggtggccaggggacgcacaaccaatgaacaggttacgggtaaattccggggaggtgtgaaccccttcaccaatggctgctgtaacaatgtcagccgtgttctctgcagttctccagcacccaggtatttggggagaccaaagaaagagaagacaattgtaatcagacctcccttccttcgaccagaagtttcagatgggcagataactgtgaagatcatggataatggcatccagggagagctgaggagaacaaagtctaagggaagcctggagataacagagagccagtctgcagatgctgaacctccacctcctcctaagccagacctgagccgttacacagggttgcgaacacacctcggcttggctactaatgaggatagtagcttattggccaaggacagccccccgacacctaccatgtacaagtatcggccgggttacagtagcagcagtacgtcagctgccatgccgcattcctccagcgccaagttgagtcgtggggacagcttgaaggagccaacctcaattgcagagagcagccgtcaccccagctaccgctcagagcccagcttggaaccagagagcttccgttctcctacctttggcaaaagttttcacttcgatccactatccagtggctcacgctcctccagcctcaagtcagcccagggcacaggctttgagctgggccagttgcaatccattcgttcagagggcaccacctccacctcctataagagcctggccaaccagacacgcaatggaagcctatcttatgacagcttgctcacaccttcagacagccctgattttgagtcagtgcaggcagggcctgagccagacccacctttaggctatacctctcccttcctgtcagccaggctggcccagcaacgggaagctgagaggcacccacgtttggtgccaactggcccaacacaccgagagccctcaccagtccgttacgacaatctgtcgcgccacattgtggcctctctccaggaacgagagaagttgctgcgccagtcacccccactcccgggccgtgaggaagaaccaggcttgggggactcaggcattcagtcaacaccaggctcgggccatgcccctcgtactagttcctcctcagatgattcaaagagatcacctttgggcaagactccactgggacgcccagctgtcccccgttttggcaagccagatgggctaaggggccggggagtagggtcccctgaaccaggcccaacagccccatacctgggccgatcgatgtcttacagcagccaaaaagcccaacctggtgtctctgagacagaagaagtggccttgcagccattactgacacccaaagatgaagtacagctgaagaccacctacagcaaatccaacgggcagcccaagagcttaggctcagcctcccctggcccaggccagccacctctcagtagccccacgaggggaggagtcaagaaggtgtcaggggttggtggtaccacctatgagatttcggtgtgagccttcggcacctcccctccccaacgcctctgcgcctacaccaaagggccccaggtggccaccttccttccctcaaggggctcccctcccgtgcatggacattttttaaaccaccgattccaagaggatgaggagtgttttctaaaatgcagtaggcttggggagtcggagagttggggccctgagactggggtagcaacccccccttttatcttttaagaccttcccttccttgatccctggaccagactcagtggacatttgtgcaattgctcgccctggagggaaccagatcatttttaaaccagaaataattttttttattattgttacggattctatttttttcctcttctgcgttaccaggtgtgtgtgtacatataatatatatatatatatattataaatatcaaagaaattatatatctatcctgggatgggaaaatgagggagggatacatatacggagggggatcttactcttcccattcctcagaccagcaggaaaagaggggagacgtcagtctttttcctgtggttccctctcatttgtcccagttactaactacggaaatagcatcctctgctggtgctaagtgtgattaggaagaagcctggggagaggtgagtctggaattttggtcacaagagggaaggacttggagaggagaattagttttctaggctcattggcatttagtttccctaggaaaggggtcaaaacttcaagacactggtggtggtgggagatcaggaaaataacttggcctagctcaaacaatattggataatcccctccttgggggagagggattagagtgtgctcctactggccccttggagcctcccctagcttacacagttaacttgattttaaaatccaaggccaggagagaagaatccaaaaagcaatatttttcatcacatgccaaaaacgggggatagagagaaggagtggcaggcctaggcccctccgattgtcccttgggggttacccctcagcccacctcactatggtgctgggtagaggggatacctgggttctaacctctaaataggggagatcccagcctccacaaagaggcccttttattttttattctgattagccattttaaaccaacgaggaataaaaagaaatcctgatctaaccagcaaaaaaaaaaaaaaaaaaaaaa

SEQ ID NO: 2463 - DNA, 4692 bp, Homo sapiens
gggaaatagagtcctggcgctgccgcggaggatcctgggtgcagccgctcagagaagcttctcgcgcacaggaagtcgctgcgaggaggcgcgtgtgcggggagttgaatctcccgctcccttgaggctggggttgcgtctgttgacgcggccgactacaatcccgagggagactcacattgggacttgtcctcctcctcctggacattttgggggctcgtcagcatggacagcgagtcagccatgggtggaagggaggctttctcacagctcccttgtgcttcccacagccctgccagccgggaacacggaggggaaggaggaggagcttaaaagaggctactgaaccccagttggccatggctgaggaatttgtgaccctcaaggatgtcggcatggacttcaccttgggagactgggagcagctcgggctggaacagggggacacgttctgggacacagcgttggacaattgccaggacctcttcctgctggaccccccaagacccaacctgacctcccacccagatggcagtgaagatctggagcctctggcaggaggaagcccagaagcaacaagccctgatgtgactgagaccaagaactctcctctgatggaggatttcttcgaagaaggattctcccaggagattatagagatgttatccaaggatggcttctggaactccaatttcggagaagcctgtatagaggacacctggttagatagtttgctaggcgatccagaaagtcttctgaggtctgatattgccaccaacggggaaagtcccacggaatgcaagagtcatgaattaaagagaggactcagtcctgtgtccaccgtttccacgggagaagattccatggtgcataatgtttctgaaaagaccctcacaccagctaagtctaaggaatataggggtgagtttttctcctactccgaccacagccagcaggattctgttcaggaaggggagaaaccatatcaatgtagtgaatgtgggaaaagcttcagtgggagttaccgtcttacccagcactggatcactcatactagggagaaacccactgtccatcaagagtgtgagcaaggttttgaccggaatgcttccctttctgtgtatccgaaaactcacacgggctacaaattctatgtgtgtaatgaatatgggacaacttttagtcagagtacatacctgtggcatcagaaaactcacactggagaaaaaccatgtaagagtcaagatagtgaccacccacccagtcatgacacacagcctggtgagcatcagaaaactcacacagatagtaagtcctacaactgtaacgaatgcggcaaggcttttacccggatcttccaccttactcggcaccagaagatccacactcggaaacgctatgagtgttccaagtgccaggcgaccttcaacttgagaaaacacctcatccaacatcagaaaactcacgctgcaaaaactacctctgagtgtcaggagtgtgggaagatttttaggcacagttcgctgctcattgaacaccaggctcttcatgctggagaggagccttataagtgtaacgaacgtgggaaatccttcaggcataactctaccctaaagatccatcagagggttcacagtggagagaagccttacaaatgcagtgagtgtgggaaggccttccaccggcacactcaccttaatgaacatcggcgaattcatacaggctacagaccccacaaatgtcaggaatgcgtcaggagtttcagccggccctcacatctgatgcgacatcaggccattcacaccgcagaaaagccctatagctgtgctgaatgcaaggagactttcagcgataacaatcgccttgtgcaacaccagaaaatgcacactgtcaaaaccccatatgaatgtcaggagtgcggagaacgcttcatttgcggctcaaccctgaagtgccacgagagtgttcacgccagagaaaaacaaggattttttgtgagtgggaagatcttggatcagaacccagaacagaaagagaagtgctttaagtgtaacaaatgtgagaaaacctttagctgcagcaaatacctaactcagcacgagaggattcacaccaggggagtgaagccctttgaatgtgaccagtgtgggaaagcctttggccaaagtactcggctcattcaccatcaaagaatccactctagagtgaggctgtataaatggggtgagcaagggaaagccatcagcagtgcctcccttatcaaacttcagtccttccacacaaaggagcacccttttaaatgtaacgaatgcggaaagaccttcagccacagtgcacacctctcaaaacatcagttaattcacgctggagagaatccctttaaatgtagtaagtgtgacagagtcttcacccagagaaactaccttgttcagcatgagcgaactcatgccagaaagaagccgttggtgtgtaacgaatgcgggaaaacgttccgtcagagctcatgcctttctaagcatcagagaattcactcaggtgagaagccctatgtatgtgattactgcgggaaggccttcggcctgagtgctgagcttgtccgccaccagagaattcacactggagaaaagccttatgtttgtcaggaatgcgggaaagccttcacccagagctcatgcctttctattcaccggagagttcacactggggagaagccctacagatgtggtgaatgtgggaaagcctttgcccagaaagcaaatctaacacagcaccagagaattcacacaggggagaagccttactcctgtaatgtgtgtggcaaagcttttgtcctcagtgcccatctcaaccagcacctgagagttcacacccaggagacactttatcagtgtcaacgttgccagaaagcctttcggtgccactcgagcctcagccgccatcagcgtgtacacaacaagcagcaatactgcctgtagccattgggtggcagcagagtcccagaatatgagaccgttactcggatgttgaaagttggaaactatcccattgcaagtttctctccaaataaatgcatctaaagattgattagaaagtttgtgcgcatgtttttcattataacaatgaaaacacaaaagtggagaagctgtacaacgtcaggattcagaggtaggctctggagccagtctaccttgagttaaatcccacctctgccatctactacctaagtgaccttgggaaggtcagaaaaatctctcagggcctcggtgtccttatctgtaaaatgggcatcacctacctcagagggcttttctgaggattaaataaataaatgtgaagcacttagaactgatggccagcacatgagggctcaccaagtgtaagccacaaatacacatcagctatagcacaaatatacttgtgttacaagaaaggaattagtaatctgtgtttactgtagttaatgttcttacaatgtatcgcttttaatttaagttttccttttttacagtttttctccagcactttactcttcttaagtgcctggccttttttgtccctttatctctcctggtttttttcttaagccccagaaagccaaaaagaacatgtaaactcttcacctcaactagctacaaccttccactcctaacctcccaagcttctcacttaaagaggactccctatcccacaaacacatgctccctcttcctatgaccttcctccatttaacagtgttggttatgcaataagacacccaatttttcatgggagttgacaccaaaacacagctggattccatcaggaaagctgcattgatcagggtgttaaccgcatatgaaacaacccatatggaagacatacttaggggtcaaacctgtggtgtgtggaagtgaccactgggatgtcatcattcaccatttatccaggatggccgctcaccaggcaatttgctaggctcgggggcgggtagtatccatacactatgcactactgctctgaagcttctggaatcagaaatgaacccattttcatcgacgattgctgttagttgacaagtgacatcttgaaaatgccacattccctcatgtcacaggaagttctgggatcaccaaggattgttggagagtccagtgagatggaaccacacaaccagttccctaccagtgtcttgtcagctctgggtgtttgttccctgccactaagtggctcagtcacacctttgctgaaacacagtagtcttatgaaaagcactggacacatactttgaatacctttcatattttaggtgctgaaaatggtgagggagtgagtgctctgcacccttgggcttttcaactcttgcacctggagttctgctggttaagtttgttaaacttagttgaaactgggaacctgttggctaaccattggggccttacactgtttttcaaatggttgcaacatttaacttctcgcacatggttcccgtcctctggagctctgtcttgtcggggagatgggcatgttgtataccaaaagagtgtacaaagtgttgcagggctgtgacacaatagggactctatggaaaactggcagccattgggtgtgggggcagtctgtaaatcagtcacctgtgttgctgcaggccaaggtagaaacgccctccgtgtgtgcatatttgttggttctctgattaaagttttgagtctaaaa

SEQ ID NO: 2464 - DNA, 10487 bp, Homo sapiens
acgcgggggagtgcagctggcaccatgggtgtgctccagagcaacttctgcttgctctgagccccctgccctgcctcccctttcaccatgtttcctctgacaagattttaagtacagcaattcaagaagatttctcctcctaaacgacatttatctgaagtctattgcctcttgattgctggaaaagaatcttaaaatcatttcaaaagtaacttataaacaaacttattaaaagtgatgaaaggagcattgaaattaattagcactaatttttcactgtgccaaagtgtgcagtgtccttcagaggaaacaataacagatctggtgagtgtgccatgccagtggggagaattgaatgtccctcatctccctctttccctagggacattagtcatgagtgccgagtgtgcggggtcacagaagtgggtctttctgcatatgcaaagcacatttctggccagttgcacaaagataacgttgatgcccaggaaagagaagatgatggaaaaggagaggaagaggaagaagattattttgacaaggaactcattcagttaataaaacaaaggaaagaacaaagtcgacaagatgaaccttccaatagcaaccaagaaataaactctgatgacagacgaccccaatggagacgagaagaccgaattccttaccaagacagagagagttacagtcagcctgcatggcatcatcgtggacctccacagcgggattggaaatgggaaaaagatggctttaataatactaggaaaaacagctttccacattctttgaggaatggtggtggaccaagaggacgttccgggtggcataagggtgttgcaggaggctcctcgacttggtttcacaaccatagtaattctggaggtggttggctttcaaatagtggagcagtagattggaatcataatggtacaggaaggaattccagttggctttctgaaggaacaggtggcttttccagttggcatatgaacaacagtaacggaaactggaaatccagtgtacgtagtacaaataattggaattacagtggccctggagacaaatttcaaccaggcagaaacagaaattctaactgtcaaatggaagacatgactatgctatggaacaagaaatctaataagtcaaacaaatacagtcacgacagatataattggcagcggcaagaaaatgacaaacttggtacagttgccacatatagaggtccttctgaaggatttacaagtgataaatttccttcagaaggcttactcgacttcaattttgagcagctggaaagccaaaccactaaacaagcagacactgctacttccaaagttagtggaaagaatggcagtgcggcaagggaaaagcctcgtcgctggacgccttacccttctcagaagactctggatttacagtcgggattgaaagacatcactggtaacaagtcagaaatgatagagaaacctctctttgattttagcttgataactacaggaatacaggagccccaaactgatgaaacacgtaattccccaacacagaaaacacaaaaagaaatacatactggatctcttaatcacaaggcctcttctgattccgctgcttccttcgaggtggtgagacagtgccccactgcagaaaaacctgaacaagagcatacaccaaataaaatgccatcattgaaatccccactccttccatgtccagccactaaatcattgtctcaaaagcaagatccaaagaatatctcaaaaaacaccaaaacaaattttttttcccctggagaacactcaaatccctcgaacaagcccactgtggaagataaccatggtccttacatatccaaactgcgtagttcatgtcctcatgttttaaaagggaataaaagtacatttggctctcaaaagcaatctggtgataatttaaatgatactttacgaaaggccaaagaggtgctacagtgtcatgagtcattgcaaaatccacttcttagcacttctaaaagtaccaggaactatgcaaaagcaagtagaaatgtagaagaatctgaaaaagggtctttgaaaattgagtttcaagtgcacgcactagaagatgaaagtgatggagagacatctgacacggaaaagcatggaacaaaaattggaaccctaggttctgcaactacagaattgttatctggcagcactcgaactgctgatgagaaagaggaggatgaccgcatcctgaagacttctagagagctatccacttccccatgtaatcccatagttcgccagaaagaatctgaattacaaatgacatctgcagccagtccacaccctggcttattgctagacttgaaaacctctctagaagatgcacaggttgatgactctattaaatctcatgtatcttatgaaacagaaggctttgagagtgctagcttggatgcagagcttcaaaaaagtgacatcagtcagccctcgggccctctcctgcctgaactaagtaagcttggctttcctgcctcacttcagagggatctaacccggcacattagtttgaagagcaaaactggagtacaccttcctgagccaaacctcaatagtgcccgccgcattcgcaatattagcggtcaccgaaagagtgagacagagaaggagtctgggctcaagccaaccctacggcagattctaaatgcatctcggagaaatgtcaactgggaacaggtcattcagcaagtaaccaagaaaaagcaagagctgggcaaaggcttacccaggtttggcatagaaatggtaccccttgttcaaaatgaacaagaagccttagatttggatggggaacctgatctgtccagtctagaaggattccagtgggaaggtgtttccatttcctcgtcccctggcttggcaagaaagcgaagcctttctgagagcagcgtgatcatggacagagctccttctgtgtatagcttcttcagtgaggaaggtacaggcaaagaaaatgagccccagcagatggtttcacctagtaactcattgagggctggacagagccagaaagcaaccatgcacctcaaacaagaagtgacacctcgggctgcctccctccgaacaggtgaaagggctgaaaatgttgctacccaaaggcgacatagtgcacaattatcctctgaccatataatacctttgatgcatttggcaaaagacttgaacagccaggagaggtctataccaccgtcagagaatcagaattcccaggagagtaatggagagggaaactgtctgtcatcaagcgcatcctcagcccttgcgatctccagtttagcggatgcagccacagatagtagctgtacctctggtgctgaacaaaatgatggccaaagtattagaaagaaacgaagagccactggagatggatcttctcctgaactcccaagtcttgagagaaaaaataaaagaaggaaaattaaaggaaaaaaagaacgttctcaggttgaccagctgctgaatatttctttaagggaggaagaacttagtaagtcattgcagtgcatggataacaatcttctgcaagcccgtgcagcccttcagacagcttatgtggaagttcagaggctacttatgctcaagcagcagataactatggagatgagtgcactgaggacccatagaatacagattctacagggattacaagaaacatatgaaccttctgagcacccagaccaggttccctgtagcctcacacgagaacgaaggaacagtagatctcaaacatccattgatgccgcactgctgcccactccctttttcccactttttctggagcctccatcttcccatgtgtctccatcacccaccggagcctctcttcaaataaccacgtctcctactttccaaacccatggcagtgtccctgctccagactcatcagttcagattaaacaagagcccatgtctcctgaacaagatgagaatgtgaatgctgtgccaccaagctctgcctgcaatgtgtccaaggaattactggaagctaatagagagatcagtgacagttgtccagtttatccagtcatcactgctagattgtccttaccagagtcaacagaaagtttccatgagcctagccaagaactgaagttttctgtggagcaaagaaataccagaaacagagaaaactctccctcttcccaatcagctggtctttctagcataaataaagaaggggaagagccaaccaaaggcaatagtgggtctgaagcctgtaccagttcttttctaagattgtcttttgcttcagaaacccctttggagaaggaaccccactctccagctgaccagcctgaacaacaggcagaatccactttgacatcagctgagactaggggaagcaagaaaaagaagaaactccggaagaagaaaagtctacgggctgcccatgttcctgagaatagtgacactgaacaggatgttttgactgttaaacctgtaaggaaagtaaaagctggaaagttaattaaaggggggaaagtaacaacctccacttgggaagacagcaggactggtcgggagcaggagagtgtcagagatgagccagatagtgactcgtctctggaagtcctagaaattcctaatcctcagttagaagtagtagccattgattcttcagaatcaggagaagagaaaccagacagcccatctaaaaaggatatttggaactctacagagcaaaacccactagaaacgtctcgttctgggtgtgatgaagttagctctaccagtgaaattggcactcgctataaagatggcatccctgtaagtgtggcagaaactcagactgtgatctcctccataaaaggatcaaagaattcttcagaaatatcttcagagccaggagatgatgatgaacccacagaaggaagctttgagggacaccaagctgccgtaaatgcaattcagatatttgggaacttgctatatacctgttcagcagataaaactgttcgggtttataatctggtgagtcggaaatgtattggtgtctttgagggtcatacctccaaagttaactgcctcctggttactcagacctccgggaagaatgctgccctttacaccgggtccagtgaccataccatccgctgctataatgttaagagccgagagtgtgtggagcagttacagctggaagaccgggtcctctgcctccacagtagatggcgaatcctctatgcgggactggcaaatggcactgtggtcaccttcaacataaagaacaacaaacgacttgagatctttgaatgccatggccctcgggcagtcagctgtcttgctacagctcaggaaggtgcccgaaaactgctggtcgtggggtcttatgactgcacaattagtgtacgcgatgcccggaatggactgctcctcagaactctggagggccatagcaaaaccattctttgcatgaaggtggtgaatgatctcgtgttcagtggctccagtgatcagtcagtccatgctcacaacattcacactggtgagctcgtgcggatctataaaggtcacaatcatgcagtgactgtggtgaatatcctaggaaaagtgatggtgactgcttgcctggataaatttgttcgtgtctatgaattacagtctcatgatcgattacaagtttatggaggacacaaagacatgattatgtgtatgaccatccataaaagcatgatttacactggctgttatgatggcagtattcaggccgtgaggcttaatctgatgcagaattaccgctgttggtggcatggttgctctctgatatttggcgttgtagatcatttaaaacaacacttgctgaccgaccacactaatcccaacttccagactctgaaatgtcgctggaagaactgcgatgcttttttcactgctaggaaaggatccaaacaggatgctgcaggacatattgaacgacatgctgaagatgacagcaaaattgattcatgaagttttttgcctcccacgttgggaagtcattagttgaactattttcacattggccccccacacaggccactctcttccctttcttggtgaagtaaggaaggagaaagtggttactagccaggcatacccctagcataagtctgggcagctctatgggatgataaattacacttttaagttcttgctggaggttttaaatagatttagacaaatgttaaggaaccatacttctctgggacagcatggcatatagtgatatatgctatttgcgttctccagatgtttattgaagatacagatcctaattggttacccagtttgaccctaatcatatgtatattttattgatttcagtttgcaatttttaatttatgttcttatgatggtttaaacctatagtcaggcttttaagtacaagtttgtttaagtgccagactttgaggatcagttttaatttctccatttgtaatagctgggtatttaaactggaagcaaatagttttctttcttaacaattatgtgcagtgtgtgtcactgttttcttgctttatagatagagctggctttaagtgctaaaggacacagtagatttttgacaaacagtggctgctctgctgactatcttttaggaattcaggaagcaaatcacatagtgacaagtccttacagacaccacttctagtaaatctctgtaaatgtggatagaaagctcagtgtgaggcagtgcgtagacctaacgtctacctttacatctgctgttgaacctgggcactacctgttacagatcctgtcaggctgttgaactggaggtgtacctttatcttcctttctagtgtctgaccctgcaagcctaatgttggtttgaacccttttggtttgttcagttgccagcctccatctctcccactgtatggccgtgcctagaccgatggcagccatcgaatattcctctgggctcacggggtgttttccacccccctgcagcaactaagatggtgggggagagggggttagaataaagcatctgaatacagttttcaggacctcaagcagacttcctagagacttgtttctgagacagttctttgccttcacttccctgctagctgggaaagaagagtggagcagagactctgcctggccactgagaacagccaaattcacaaaccctcagtggggctttgtttttggattttctccggactcatcagtaaacctgtagaagtgtcgctttccagccttttgtttctggatcctcaaaactcagaacgtggccgggcgtggtggctcacgcctgtaatcccagcactttgggaggctgaggcaggcagatcacctgaggctaggagttgcagaccagcctggccaacatggcaaaaccccgtctctactaaaaatacaaaaagccgggcgtggtgggcgcctgtaatcccagctgctcaggaggctgaggcaggagaatcgcttgaacccgggaggcagagattgcagtaagctgagatcgtgccactgcactccagcctggtgacagagtgagactccgtctcaaaaaaaaaaaaaaaaactcagcttcttcagagagataaaattgggggaggagcccagggccacataccaagctttgggacatggtgcctcatgctctctgggattgcagaccatccaggtctgtcttcgcccctgttagtgcacatatatccactcacatgtcttccctcaggctatcgggcagggggacttcaccagggggtttatggataggcttcaagagggtctgtgagcccccagaaattgtgtgtgagactgagtatgtgttcttttttccaggaaaggctccagtggttcttacttgatccaaaaaatgtcaagaattaatctaggaggccgggcctggtggctcacacctgtaatcccagctctttgggaggccgaggcgggtggatcactcaaggtcaggcatttgagaccagcctggccaacatagtgaaaccccgtctctattaaaaatacaaaaattagctgggtgtggtggtatgtgcctgtagtctcagctactcaggaggctgagacaggagaatcacttgaaccctggaggtagaagttgcagtgagccaagatcatactactgcactccagcctgggcgacaagagtgaaactccacctcaaaaaaaaaaaaaaaagagttaatctaggagataatgaatggcctagtactagataatatatggccccacaagctcttgacttctgtccttggggaaagccattttgttaaccacactagtgagatttacatgatgcttaatggagaacagagaagatcttgttgcaaaaggtgtattaaatatttgtgctgtttctgtatgagattgagaagcttttcccacctctcacccctatttcctataaggatatccagagaagccaaactgttctgtgggtttgggaatggtcatttcccgggaaaatgcatctggatcgatgactaaacctggcccttttctctgggctgtagtgaagccgcattttcacgctggctggcagtgtgctgagagcctcgaatgctctgcggcgtagtgcccttctgccctgcctgacgatgtatcgaaaagatgagagtgaaggagactttgtgcagcaggaaacgggtaggtgaggtgttgggcagttgtgggaacttctgagagtattacagagtggtagaatcggtaagaactctgatttggacttcgctttggtggaactgtgtgcctatacctgcctgtgtgtgtgcaagtgtgcaggttcctttgtatgtatgtgtacgtgtgggaacctgtgtttgtcatatttttcttcatttcacaaaggctttttttgaagcagtggcagtatgcctttgtttcaagaacacatgaaattcttttaacaccagattagtgtgttaccccaaatgaacggttctagccctctattaagaaataaagggaccataagcattttggctgcttatggctgtgtgttactacttacaagagtcttgaaaattatacagaactttgccttctttttttaatgtcttccacaatgttgtgactgattataaccctgtttcccctcagagaagagctatggctcagggatctgtgttgactctggcatttagtggctttgtgaaggaaagaaaccattaaatgacctgacaaaaactgactcatgtctttaaagtagttgaagccacttttagaatgttactctcggttgcttttgtctaattctaatggcttaaagccaagaaaaccatagtataaatctttttgtgtacctatgctagtgtttaaatggcagttcgttgtgataaagtatcagtcacttcaagttttctgtgaaagtttttaattaggttaaaaataattttggcatacgtctctactcagtttataaagcagttccacaccatgcaaacaaaactctaacagcaaaggttatcttgacctgatgttacttgaatctgagagaaagtcattacttactactgcactcctgcttttgtgggaaaaattttcttcttccccagaagagttaacagttgagtgttcagctcctgacttacctttaatttagaggcaatattattactgtttaagtgattatttgcttaacacaggttttattttgtctttttgctggtagattatacaagggacaactttagtgatgaggcatgtggatgatttggtgggagtaggtatatacttagtggaatggtttattttatggaagagaattcattggaggtgagattgaagtatattgtgaagtgggatttgaacagcacatatgctctggtttgctcaaataactgcagtttatgcttacatctaaattttgtttctgttacctaaacgggagcttctagaattacgaaggccatacctgccacatttataaaataatggttttatccctgcccccaaatcatcaggttcctcgggtttaagagaagtggtctaatagacaggaatagaagttgtggtggaggtgatttgggatagactaggtttccttatgcaagtggatatgagctcctcatagaaaccagacctactgtattagacagtaacctctaacctcacctccaagcccaagtatatggccctgctgggttacctggtgactacatttcccagattcactctaaattcaaggtagtgacccaaataaattgggaaaggagggggtcaaggaggaaaagctgttgaaaatctttctcctatttaagagaaatatatgccctagagctgctccagcacccttggtttctgatttttttaatattgaatatggattagaagaatgaaatcagatgacacctgactgcaaaaatgtttataagcaaatagccttcttacattttggtataaagctgtgaacttcgtaactttgtaaagcaagatataaagcaaatacaagaggaaaataaagtacttttactaattgaaaaaaaaaaaaaaaaaaaa

SEQ ID NO: 2465 - DNA, 2646 bp, Homo sapiens
agtttctcctttgttttacgtttgggaggaggtggcattggaaatagcagagtgcttcgcggtaacaggggttggagtgcaatggtgtgatctcagctcactgcaacccctgcctcccaggctccagcgatcctcccacctcagcctcctgaatagctgaccaccagcacactaggcaaacccaccccactcaccgcctcccttgggaattcagacctaaccatcgctgagctgaaacaaatgtactgaggctggagcctgtgtgaacagaacagaagaggccttcactctagtagtgctcacagtccagcaggtgtttgctgaagacagcttactcagatcactactgcctggaggtggttgatatatcctggtgtaaaccttcaagaagggcacaggcaggaaaacatgagccagcaactgaagaaacgggcaaagacaagacaccagaaaggcctgggtggaagagcccccagtggggctaagcccaggcaaggcaagtcaagccaagacctgcaggcggaaatagaacctgtcagcgcggtgtgggccttatgtgatggctatgtgtgctatgagcctggccctcaggctctcggaggggatgatttctcagactgttacatagaatgcgtcataaggggtgagttttctcaacccatcctggaagaggactcactttttgagtccttggaatacctaaagaaaggatcagaacaacagctttctcaaaaggttttcgaagcaagctcccttgaatgttctttggaatacatgaaaaaaggggtaaagaaagagcttccacaaaagatagttggagagaattcgcttgagtattctgagtacatgacaggcaagaagcttccgcctggaggaatacctggcattgacctatcagatcctaaacagctcgcagaatttgctagaaagaagccccccataaataaagaatatgacagtctgagcgcaatcgcttgtcctcagagtggatgcactaggaagttgaggaatagagctgccctgagaaagcatctcctcattcatggtccccgagaccacgtctgtgcggaatgtgggaaagcgttcgttgagagctcaaaactaaagagacatttcctggttcatactggagagaagccgtttcggtgcacttttgaagggtgcggaaagcgcttctctctggactttaatttgcgtacgcacgtgcgcatccacacgggggagaaacgtttcgtgtgtccctttcaaggctgcaacaggaggtttattcagtcaaataacctgaaagcccacatcctaacgcatgcaaatacgaacaagaatgaacaagagggaaagtagtcctccaacaggatgaagcagattaacagaagagtgatcagtgacaaacatgcctcattgattattgtttctaggaaggaatttctaaatcaatattgcaaccccaaaagcggttataatttggtgttactaagatgctcctacactttgtgataccgttttaaggacatggtgcatttttttttcttttatttgttttatttagaactttttttatttgttttatttagaactttgtgtgttcttaaagtgtgcttccaacaggaaggtcagtgataaattttcaaaagcataaccttcaatatattatctgttggattattggatataagacttattttcatgtactataaatatgaaaataactttgatttttaattgtgtagtttccatttcttagcttttgccttttaaatttatacttcagccaggcatagtgactgatgcctgtaatcccaacactttgttgggaggccaaagcaggaggatagcttgaggccaggagttccagaccagcctgggcaacatagtgagatcctgtctctacaaaaaaaattgtttttatttgtatttatatatttttatttttgtttttgttggtaggcgtctcgctctgtcacccaggctggagtctagtgtcgtgatcttggctcactgcaacctccacctcccgggttcaagtgattctctggcctcagcctcccaagtagctgggactacaggtgtgtgtcaccacgcccggctaatttttgtatttttagtagagatggggtttcaccatgttggccaggctagtctcaaactcctgacctccagtgatctgcccacctcggcctcccaaagtgctgggattacaggtgtgagccactgtgcctggccccccacaacatgtttaaacttagctaggcctggttgcatacgcctgtgttcccagctactcaggaggctgaagcaggaggatagcttgagcccaggagtttgaggctacagtgagctgtgattgcaccactgtactccagactggataacagcaagagcccatcttttaaaaaaagtaaaaattaaaaatatacttcatggttcatgtcatagccctagagaatgaaaaatttgcagtagatagtcaataaatgaatcagtagttaaatattccttaaagtcaactgtatttcattgtgatttttgttttctttttatcattgtatcaaactatatggaaatcatatggttagatgtgattatttgataatgttagtccatttgaatccattttagatatttcacaattaaagaatatgaaacttc

SEQ ID NO: 2466 - DNA, 5811 bp, Homo sapiens
gtccgtccggttcttgctatattgccccaggctggtctcgaactcctgggctcaagccgttctcccgcctcccactgcccgcctgtcactgccgtctgttccctgagctgtgctttacgctgggaaagacatagaagaactattaagaagatagaattgttttgctgcgcagtacagcaacagtggatgttcaagattaagattagagtcaagttgtgtgattaagacaggagctgtgactgatgagaattaaaggccatggatgaagatgggcttgaattacaacaagagccaaactcattttttgatgcaacaggagctgatggtacacacatggatggtgatcaaattgttgtggaagtacaagaaactgtttttgtttcagatgttgtggattcagacataactgtgcataactttgttcctgatgacccagattcagttgtaatccaagatgttattgaggacgttgttatagaagatgttcagtgcccagatatcatggaagaagcagatgtgtctgaaacggtcatcattcctgagcaagtgctggactcagatgtaactgaagaagtttctttagcacattgcacagtcccagatgatgttttagcttctgacattacttcagcctcaatgtctatgccagaacacgtcttgacgggtgattctatacatgtgtctgacgttggacatgttggacatgttggacatgttgaacatgtggttcatgatagtgtagtggaagcagaaattgtcactgatcctctgactaccgacgtagtttcagaagaagtattggtagcagactgtgcctctgaagcagtcatagatgccaatgggatccctgtggaccagcaggatgatgacaaaggcaactgtgaggactaccttatgatttccttggatgatgctggcaaaatagaacacgatggttcttctggaatgaccatggacacagagtcggaaattgatccttgtaaagtggatggcacttgccctgaggtcatcaaggtgtacatttttaaagctgaccctggagaagatgacttaggtggaactgtagacattgtggagagtgagcctgagaatgatcatggagttgaactgcttgatcagaacagcagtattcgtgttcccagggaaaagatggtttatatgactgtcaatgactctcagccagaagatgaagatttaaatgttgctgaaatcgctgacgaagtttatatggaagtgatcgtaggagaggaggatgctgcagcagcagcggcagccgccgccgtgcacgagcagcaaatggatgacaatgaaatcaaaaccttcatgccgattgcatgggcagcagcttatggtaataattctgatggaattgaaaaccggaatggcactgcaagtgccctcttgcacatagatgagtctgctggcctcggcagactggctaaacaaaaaccaaagaaaaggagaagacctgattccaggcagtaccaaacagcaataattattggccctgatggacatcctttgactgtctatccttgcatgatttgtgggaagaagtttaagtcgagaggttttttgaaaaggcacatgaaaaaccatcccgaacaccttgccaagaagaaataccgctgtactgactgtgattacactaccaacaagaagataagtttacacaaccacctggagagccacaagctgaccagcaaggcagagaaggccattgaatgcgatgagtgtgggaagcatttctctcatgcaggggctttgtttactcacaaaatggtgcataaggaaaaaggagccaacaaaatgcacaagtgtaaattctgtgaatacgagacagctgaacaagggttattgaatcgccacctcttggcagtccacagcaagaactttcctcatatttgtgtggagtgtggtaagggttttcgtcacccgtcagagctcaaaaagcacatgagaatccatactggggagaagccgtaccaatgccagtactgcgaatataggtctgcagactcttctaacttgaaaacgcatgtcaaaactaagcatagtaaagagatgccattcaagtgtgacatttgtcttctgactttctcggataccaaagaggtgcagcaacatgctcttatccaccaagaaagcaaaacacaccagtgtttgcattgcgaccacaagagttcgaactcaagtgatttgaaacgacacataatttcagttcacacgaaagactacccccataagtgtgacatgtgtgataaaggctttcacaggccttcagaactcaagaaacacgtggctgcccacaagggcaaaaaaatgcaccagtgtagacattgtgactttaagattgcagatccatttgttctaagtcgccatattctctcagttcacacaaaggatcttccatttaggtgcaagagatgtagaaagggatttaggcaacagagtgagcttaaaaagcatatgaagacacacagtggcaggaaagtgtatcagtgtgagtactgtgagtatagcactacagatgcctcaggctttaaacggcacgttatttccattcacacgaaagactatcctcaccggtgtgagtactgcaagaaaggcttccgaagaccttcagaaaagaaccagcacataatgcgacatcataaagaagttggcctgccctaacaatacttctacagaacgtttgtagagatattggccttgaagcagaaaattcattttaaagccaatcagtctcattcacatacaatactgtatattgatttatgctgtgtacaaatagaattattacttctagttgacttttttttaaatatacattttgctcagtagtgtgttctgaattctattcagtttgtttaataaatagggaaaactggcaacatgctagttacttttaataaagtaatccctgattctataccgaagttttatatcttagaattttatatttatttaaatatttaccttgcttaccttgatggtactcttctaagaccattaacttaaggtaactttatattggtaactctgaaagtattcatgttgactcatttttttccccatacatttctcacaataaaattgtcagagacatctactaatataaatgggagattttacagtcaggtctaattatcataacatggaagtcatttacttgtcttgcttaatattttcagaccacttgacagtgaaagtttccatttgagctgttgcgtccctggctttgctgagtaaagagcagtggctgggttcgtgtttacttttcaaatatacttcttttggctttctttggattatttacatcttttgtcagcgtagcaaacttttagaaaaccttattgaaaaactgtgcttgctcatgttgtattttgattattctgtctgtgcggcttcatcttggaatggttgtgtgctacaaatgacacttactgaggactgcattttggaatctcctagaggtaactcatggcttataggatcttttgcaactttatgtatgtaaatgtaccctgaattatatatatacacatatatatcatgtacctgtgtgtattgcttattttacatatttatacacacaaccccaagtagtagttgtttaaaatctataatgaaaagtattaaatttacaataacatgaaagatccagggatgcatgagagagcattttgtaagtcatgctcttcagagagactactcaggtgaagaattagaaggaaaataaggacactagtatttttaaagagtaaagatattttcttttaaatatctttggtaattgaaacatagaggttaagatgtttctaggtagaatgttttcatacaatttcacctccatgtctttatgtttttctgaaaagcaaatgagtatccagacatgactcccacagttctctttgagaagcctgagagggaactctgtcttacctagtgagggggatggaaaagaagtgatggctctgtggaccagagaacgggtgctaattatgacttcacactcggcaagttcaggctgatctgttatttctcagttacagttagcaaactttaaaaacttaacactcaagttggctttgattaaaaggtaaagatgtgttttaagtggataaggaaagtctgaggccttatttggaacatcactaagtcttccacaggttttttgtttgtttgtttttttttgttgtttttttttcttaagacggagtcttgctctgttgcccaggctggactgcagtggtgtgatcactgcaacctctgcagctcactgcaacctctgcttcctgggttcaagcaattatctgcctcagcctctcgagtagctgggattacaggcgcccaccaccacgcccggctaattttttgtatttttaatagagatggggtttcaccatcttggccaggctggtcttgaaccctgacctcgtgatccacctgcctcggccttccatagtgctgggtttacaggcgtgagccaccgtgcccagacaccacataggtctgaatcagtgtcatacattcataaaacaaactcggttaattagaacttggttatgttaagacgaatctgggagaacagaaaacagtttttggggtcccttcagttggctattggtccgtatgcatctagcacattgtaggagatttagaaattgtcttcccacccgatagctgccttgtcacctcattatggtgctccatcccctgtgtgcttaggtttttacctttcatctttctctttgccattgatgtttgtattcaagagttatatttttagggttagaaatcaaaatatttggtgtttggcaaacctctgaagtgctagactgatttagtctagttttaaaccaagtgctttaggcaggtgtgaactccagcccaaatgccagtcaaagtcaaggcatgggttttcctagcctatcttataggaaattcctgtaccttcttggcccccataatgtgttttttttttttttttttttttaaactaacttacaattttgtgatccgtgattcattgccctgcgattcttgaaagctctgtctgtttttttgtgagaacctttaaaatctcccttaatttttattttcccagaaataatgtaaaaacacttaaatgaaagtggaaatgtattaattttaaatcctataaaattaatacagaaaatataaatgattgggtcatttaactatatttttttaaataaactgaaagataaagaacacaacacttcacacattttatatttctcttacatactccggaatcatacacagttctttttaaagcacaacattaaaacctttaaaaggtatttaagggtttggtcaagtgaatatgataaaacatacttgtctgtataaagagaaaatgaaattgtagtcactgttatgtactgacattagttacaacctagttttaattcttaaaacaattttgattagcaaagctaaaaaaaaatggatgtttcagttaaatgttttaaagaggtacagatttttacaaggacataatataagttattgttctgtagaaatatcctattaaatattgtatgtccctccctctgtacactttgtaaagaaagtaaaatacataaaaagaaaatcatatagggatgtgtgacattattgtaattgtgtacttgagaataacgtgcaaaaataaaaatcagaatattttcctgttattgaatgtttagtctatttgataccagtactaagttaatgctttttctcaaggaaaaaaaatgtacagtttttgtaaacctaataaacatcaaaagcagtggatta

SEQ ID NO: 2467 - DNA, 4556 bp, Homo sapiens
tggcctggtcggcgtcccgtagggcgccctcccgcgctaggccggccggcgtggcgctcggcgccgaacaggccccgaggaggccgcagttaggcctagtgattatccagttgccctgagcggctgcggaggtgcgctccataagcgggcagggtgggaaaagttcgcccgtttgtccggaaggcagttgatggacctggggtcgacaccactgcggacgcagggcacggcacgggggcgagaaggcgaaggctgcaggcgtgaggagctgtgactaatgagaattaaaggccatggatgaagatgaatttgaattgcagccacaagagccaaactcattttttgatggaataggagctgatgctacacacatggatggtgatcagattgttgtggaaatacaagaagcagtttttgtttctaatattgtggattctgacataactgtgcataactttgttcctgatgacccagactcagttgtaatccaagatgttgttgaagatgttgtcatagaggaggatgttcagtgctcagatatcttagaagaggcagatgtatctgaaaatgtcatcattcctgagcaagtgctggactcagatgtaactgaagaagtttctttaccacactgcacagtcccagatgatgttttagcttctgacattacttcaacctcaatgtctatgccagaacatgttttaacgagtgaatccatgcatgtgtgtgacattggacatgttgaacatatggtgcatgatagtgtagtggaagcagaaatcattactgatcctctgacgagtgacatagtttcagaagaagtattggtagcagactgtgcccctgaagcagtcatagatgccagcgggatctcagtggaccagcaagataatgacaaagccagctgtgaggactacctaatgatttcgttggatgatgctggcaaaatagaacatgatggttccactggagtgaccatcgatgcagaatcagaaatggatccttgtaaagtggatagcacttgtcctgaagtcatcaaggtgtacatttttaaagctgaccctggagaagatgacttaggtggaactgtagacattgtggagagtgaacctgaaaatgatcatggagttgaactacttgatcagaacagcagtattcgtgttcccagggaaaagatggtttatatgactgtcaatgactctcaacaagaagatgaagatttaaatgttgctgaaattgctgatgaagtttatatggaagtgatcgtaggagaggaggatgctgctgttgcagcagcagcagctgctgtgcatgagcagcaaattgatgaggatgaaatgaaaaccttcgtaccaattgcatgggcagcagcttatggtaataattctgatggaattgaaaaccggaatggcactgcaagtgccctcttgcacatagatgagtctgctggccttggcagactggctaaacagaaaccaaagaaaaagagaagacctgattccaggcagtaccaaacagcaataattattggccctgatggtcatcctttgactgtctatccttgcatgatttgtgggaagaagtttaagtcgaggggttttttgaaaagacacatgaaaaaccatcctgaacaccttgccaagaagaagtaccactgtactgactgtgattacactaccaataagaagataagtttacataaccacctggagagccacaagctgaccagcaaggcagagaaggccattgaatgtgatgagtgtgggaagcatttttctcatgcaggggctttgtttactcacaaaatggtgcataaggaaaaaggggccaacaaaatgcacaagtgtaaattctgtgaatatgagacagctgaacaggggttattgaatcgccacctcttggcagtccacagcaagaactttcctcatatttgtgtggagtgtggtaaaggtttccgacacccgtcggaactgagaaagcacatgcgaatccataccggcgagaagccataccaatgccagtactgtgaatataggtctgcagactcttctaacttgaaaacacatataaaaacaaagcatagtaaagagatgccattcaagtgtgacatttgtcttctgactttctcagataccaaagaagtgcagcaacatactcttgtccaccaagaaagcaaaacacatcagtgtttgcattgcgaccacaagagttcaaactcaagtgatttgaaacgacatgtaatttcagttcatacgaaagactatcctcataagtgtgagatgtgcgagaaaggctttcacaggccttcagaacttaagaaacatgtggctgtccacaaaggtaaaaaaatgcaccaatgtagacattgtgactttaagattgcagacccatttgttctaagtcgccatattctctcagttcacacaaaggatcttccatttaggtgtaagagatgtagaaagggatttaggcaacaaaatgagcttaaaaagcatatgaagacacacagtggcaggaaagtatatcagtgtgagtactgtgagtatagcactacagatgcctcaggctttaaacggcacgttatttccattcatacaaaagactatcctcatcggtgtgagtactgcaagaaaggcttccgaagaccttcagaaaagaaccagcacataatgagacaccataaagaagttggtctgccctaacagtgtgtctacaagcttgtaaagatgttggccttgaagcagaaaattcattttttaaagccagtcttgttcacatccattactatacattgaattatgctgtgtaaaaatagaattattgcttctagtccacttttctttacattttattcaatacgctgtcctgaatcctattcagtttctttaatagatgaggaaaaatagcaacaagcaagttgcttataataaaataatttgtgattctatactgaattttcagtcataaaagctttactatttatttacatatttattcatgttcatggtactcttctaagacaaaatcagattgataactatgaaagtaacatttttgacccatttcctcctacacaagtgtttcacattggagacatctgctaatataaatgggaggttttactgtcaagtccaattagcaaaacgtggtaataatttttttgtcagtattttcagattacatgataaaattttacatttgagcttctagcattgattaatataggatattgaccacgtttatgtttaaatttcattttgttcagcagacaaaatgtacttcccttaactttcattaatagtgtttacatcttttgtcagcacagcaaacttttagaaagtaatagttttacttatttttatcttctgttttctctttgtactgctttgtcttgcattgtgttccaacacatgagacttactgctcactgaattttggagtcttttagaggtaaattgtggactcaggattttttgaaacttggtgtgtaactctaaatcttgtatatgcatctttgttgcttattacatatttacacacacaaccacaaattttaaacttatgatgaaaatttacaataacctgaaagatccagagatgtatgagagcattttgtaacttgttattcagttactaaatttgaggtgaataattaaaaagaaaaggacattaggagagtgaaaatcttctcttcaaataatctttgatagataaaaatggaaggtaagatgtttctagatagaatgttttcatacaatttcagcttcatatcataaatttttctggaaagctatttcagacatagatttcatagtatttttctgagaatcctgtgaaggaacgctgtctctttgcaaagtaaggaggactaagggaaaatgatggtaccatgtaacagaatgagagctaattccaaattagcaacttcatcctgctttctattttacattgagtaaagttttaaaaagacaacagtcaagttgattttgattagaagataaaagtacataatgaaaatccatggccttatttggaatatatatcactttccaaattttattatttatttgagagttaataagttaatgttattaagcagttaataatttatatgtatggatataatataaaatgaattcatataattaaaaagaatttggttaataagaatttggagaatggaaaatacatttttaggttccttaatttggctgttggtacctgtgtatttggaatattttaggggattcgaattttttttaacccacattacagctaccttctagctttagtatggtagtgcttcattcaacttttgctgtcaggtttttattttcacctttttctgtgccaccaattcaaaagttataggattaggaaatataaatttatatttggtgattggcagcctctgaaatgttagattaatttgatctagttctaaagtgctttagtcatatatgaatttaaacctagtaccatccaaaaccatgtaatggattttaagaatctgttaggccttcttagcctttatacatgtccctacctgatttttactg

SEQ ID NO: 2468 - DNA, 1780 bp, Homo sapiens
ttccatggctgcgagaactgacgctccccaaccgtcccgcaactgtcctgtcccagactttggcaccgtcggggtccgtcgtccccgaatgtgacagcatccccaccccggctgctgcccaggatccgccggaccccggcctcgatatgggagacctggaactgctgctgcccggggaagctgaagtgctggtgcggggtctgcgcagcttcccgctacgcgagatgggctccgaagggtggaaccagcagcatgagaacctggagaagctgaacatgcaagccatcctcgatgccacagtcagccagggcgagcccattcaggagctgctggtcacccatgggaaggtcccaacactggtggaggagctgatcgcagtggagatgtggaagcagaaggtgttccctgtgttctgcagggtggaggacttcaagccccagaacaccttccccatctacatggtggtgcaccacgaggcctccatcatcaacctcttggagacagtgttcttccacaaggaggtgtgtgagtcagcagaagacactgtcttggacttggtagactattgccaccgcaaactgaccctgctggtggcccagagtggctgtggtggcccccctgagggggagggatcccaggacagcaaccccatgcaggagctgcagaagcaggcagagctgatggaatttgagattgcactgaaggccctctcagtactacgctacatcacagactgtgtggacagcctctctctcagcaccttgagccgtatgcttagcacacacaacctgccctgcctcctggtggaactgctggagcatagtccctggagccggcgggaaggaggcaagctgcagcagttcgagggcagccgttggcatactgtggccccctcagagcagcaaaagctgagcaagttggacgggcaagtgtggatcgccctgtacaacctgctgctaagccctgaggctcaggcgcgctactgcctcacaagttttgccaagggacggctactcaagcttcgggccttcctcacagacacactgctggaccagctgcccaacctggcccacttgcagagtttcctggcccatctgaccctaactgaaacccagcctcctaagaaggacctggtgttggaacagatcccagaaatctgggagcggctggagcgagaaaacagaggcaagtggcaggcaattgccaagcaccagctccagcatgtgttcagcccctcagagcaggacctgcggctgcaggcgcgaaggtgggctgagacctacaggctggatgtgctagaggcagtggctccagagcggccccgctgtgcttactgcagtgcagaggcttctaagcgctgctcacgatgccagaatgagtggtattgctgcagggagtgccaagtcaagcactgggaaaagcatggaaagacttgtgtcctggcagcccagggtgacagagccaaatgagggctgcagttgctgagggccgaccacccatgccaagggaatccacccagaatgcacccctgaacctcaagatcacggtccagcctctgccggagccccagtctccgcagtggagagcagagcgggcggtaaagctgctgaccgatctccctcctcctcaccccaagtgaaggctcgagacttcctgccccacccagtgggtaggccaagtgtgttgcttcagcaaaccggaccaggagggccagggccggatgtggggaccctcttcctctagcacagtaaagctggcctccagaaacacgggaaaaaaa

SEQ ID NO: 2469 - DNA, 5958 bp, Homo sapiens
gggaggcggtcccgggatttcaggggtctaccggctctcttatggcgaatgcaacccgaagagagagtgagctgtatcttcagagttgtctccgtctttccaagaacagaacaaaatgaacaaggtagatcagaagttccaggggtcagtatcatttaaagatgtgactgtgggcttcacccaggaggagtggcagcacctggaccctagtcagagggctctgtatagagatgtgatgctggagaactacagcaaccttgtctcagtggggtattgtgctcacaaaccagaggtgatcttcaggctggaacaaggagaagaaccatggagactggaggaagaattcccaagccagagctttccagaagtctggacagctgatcacctgaaagagaggagccaagaaaatcaatctaaacatttgtgggaagttgtattcatcaataatgaaatgctgactaaggaacaaggtaatgtaataggaataccatttaacatggacgtaagttcttttccttccagaaaaatgttctgtcagtatgactcacgtggaatgagtttcaacactgtttcagaattggttatcagtaagataaactatttaggaaaaaagtctgacgaatttaatgcatgtgggaaattgttactcaatattaagcatgatgaaactcatactcgagagaaaaatgaagttttgaaaaataggaacactctgagtcatcgtgagaacactttgcagcatgagaagattcaaactttagaccacaattttgaatacagtatatgtcaggaaaccctccttgaaaaggcagtattcaatacacggaagagagagaatgcagaagagaataactgtgactataatgaatttgggagaactttctgtgatagttcatccctcttgttccatcagatacctccatcaaaggacagtcactatgaatttagtgattgtgagaagttcttatgtgtgaagtccaccctttctaaacatgatggggtacctgtgaaacactatgattgtggtgaaagtgggaataatttcaggaggaaattgtgtctgtcacagcttcagaaaggtgataaaggagagaaacactttgaatgtaatgaatgtgggaaagctttctgggagaagtcacatctcactcgacatcagagggtgcacacaggagagaaacactttcaatgtaatcaatgtggaaaaactttctgggagaagtcaaacctcactaaacatcagagatcacacacaggggagaaaccttttgaatgcaatgaatgtgggaaagcctttagccataagtcagccctcacattacaccagagaacacatacaggggagaaaccctatcagtgtaatgcatgtgggaaaactttttaccagaaatctgacctcactaaacatcagagaacacacacagggcagaaaccctatgaatgttatgaatgtggaaaatccttctgtatgaattcacaccttacagtacaccagagaactcacacaggtgagaaaccttttgaatgtcttgagtgtgggaaatccttttgtcaaaagtcacatcttacacagcatcagagaactcacataggagataaaccttatgaatgtaatgcatgtgggaaaactttctaccacaagtcagtactcaccaggcatcagataattcatacagggttgaaaccttatgaatgttatgaatgtgggaaaaccttctgcttgaagtcagacctcacaatacatcagagaacgcacacaggggagaaaccctttgcatgtcctgaatgtgggaaattctttagccataagtcaaccctctctcaacattatagaacacacacgggggagaaaccctatgaatgtcatgaatgtggaaaaatcttttacaataaatcatacctaacaaaacataatagaacacatacaggggagaaaccctatgaatgtaatgaatgtggaaaaaccttctgccagaagtcacaactcactcagcatcagagaattcacataggggagaaaccctatgaatgtaatgagtgtggaaaagctttctgccataagtcagctctaattgtacatcagagaacccatacacaagaaaagccttataaatgtaacgaatgtggaaaatctttctgtgtgaagtcaggacttattttacatgagagaaagcacacgggggagaaaccctatgaatgcaatgaatgtgggaaatccttcagtcacaaatcatcactcacagtacatcacagggctcacacaggagagaaatcttgtcagtgtaatgaatgtggaaaaatcttttaccgtaaatcagaccttgctaaacatcagagatcacatacaggggaaaagccctatgaatgtaacacatgcaggaaaaccttctctcaaaagtcaaatctcattgtacatcagagaacacacataggagaaaaaccttatgaatgaattggatattagaaatttccagccacaagtcagcctccataatgcctcagagtcttcacactgtggagaagggcctgttgacatcctgaatgttcaataactatccacaaactcgccttatgttactccaaagtaacagtaggggataaacccatagactacaacaactataggatggcttttgttaggaagtgatattctgttgaatatcagatggttaatactggcataaaacctcacagatttttttgaatttgtgaaagtttttggcaaaactacaaataggattatgttagcatttacactgaggagaaaattgtcaatttaagaaatctaaagtgaaaattttgcttagaaataaaatatgacaagttctgttttgagtttgatgccataatagtttttaaggtatctaacaataatttatagatgtacattgtggaatgtaaagctttaagaattttttaagaagtaataattaaaataacctcacaagaagttgtaatgagtacagagaattcccgtgtacccttcaccaagcttcctctaaggataatatataatcatagtatatggtcaagtccaagaaatcgatgttaccttgctagtagatgcagacttactcagattttgctatggtttgcgtgcactctgtgtgtgtacgtgtatgtgtgtgtgtgtggttataacaaactggtacttttacatttgagtaaccatcaacacaattagtttacagaatggaaaaggagtctgagatctgtactgtttcaggattacaaaggaatcaggatttagcctcaagtagttcccttgttgtattaataaccacaccctttctgcatccctgtccctggcatccacttgactatgaagctttttgtaaagcatagataaattgaataatcagggcaacagcattaagcacatctgtgaattatccctgaagttcataggacttacatatgtacaagtggtatgtgatataaatcgtgtgtttcatatgcataatggtatttaacgtaattgtgaataggaagtaggtatcctaatttagtagtggttacttcatcaggcccatcccaggtgtttgtcgtgtcctgaaacaatttaaatagagacccacagagctaatgtttatccatttaaaagttataaatcaaaataacagattatctgaaaaaaaatctatcctgtacgtgtgaagatctaggcctgcctccatgttactccctttctcttactacctgtggctcatcccatgccatgaactgcctggggtacatatgtgaacactccagccttcagcgtaagtgatagtccaaattttctttaagcagctgctctccaagacagggccctggaaagaggcccacacatacagcccagttgctgcccagggctgttggactgtcatttcattgctcattgtacccagacagggatctgggccttcagagacttttgagaatatgaagaggagggttgaggctggagaagagccagaatcaagctggcatggggcttttattgacagtgtgaagattgtacactacattacatgatcagatcatacaaataatctaagattttacagtctggtgaccctagattacacaagtaatctaagcttccactttggaaaactagaaaaagaagagcaaattaaatccaaagtaacctggaaaaaaattagagtaaaaatcagtgaaattgaaaagagaaaatcaataaaacccaaaactgttctttgaaaaggtgggtaaaattgataaacctctagctagattaagaaaaaacagaagacaaatactgctaataccaaaagtgaaagaggccatcatagctgatcctatggtcaccaaaaggattagaaagaaatatggacaactctgtccataaatttgataacttagctaaaatggatcaattccttgcaagatgcattctctcaaagctcataaaaggtagatctcagtaggcatatatatctattaaataaattgaagcagtaattaataaccttccaagaccaggcgcggtggctaaaaatacaaaaagttagccgggcgtggtggcatgcgtgtatagtccaagctactcaggaggctgaggcagaagaatcacttgaacctgggaggtggaggttgcagtgagccaagattgtgccactgtactccagcctgggtgacagagtgagactccatctcaataaaattaataataataaaaccttccaaaaaaagtgccgggaccaaatggattcactgatgtgcatttttcgagatacttaaggtagaaatgataccaagtctgtactgtctctttcagaaaataaaagcagggataacacttcccaaatcattttgtgaggccaggattaccctaataccaaagccaggcaaaaacattacaagaaaggaaaactacagatcaatatttccagtgaacacagatgcagaaatccttaaaatgttagcaaatcaggaatgcaagccttgttcaacatttgatattcagtgcaatccattgcatgcattagcagttcaaagattaaatatgatcatatcaataggtacagaaaaagcatttgacaaaatccaatatccattcatgataaaacctctcaacacagaaggaatacaggagaacttactcaatttgataaagaactactacaaaaaaccctacatctagcatcatccttgatgtttccaactaaatgctttcctactaagatcaggaacatggcaaggaacaccactgcttttcagcattgtactggaagtgctatctaatgcagtgataccaaaaaaaaaggaaataaaatgcacataaatttggaaggaggaaatacaactgtctttgttctcaaataacatgattgtctttgtagaaaattctaaataacaaaaacctgctgacattaataagcaattatagcagggttgtagaatgtagtcctcaggtatatgataaaaaagaattagacatcaagtcattaaaagacatataggaaccctaaatgcttattgttaagtgaaaaccaatctgaaaaggctttctatgttgtatgattgcaattatatgacattctgggagaggcaaaactatcgagcgagtcaaaggaccagtggttgctgagagttgaggggaaaggagggatggcaggtaggtgatttttaggacagtgaaagtactctgtagggtactgtaatttgtcaaaatgcagagaatggaaaacagtgaacggaaaacacagagtaaaccctagtgtcaactctggacttcagttaataacagtgtaccactattggctcatcaattgtaacaaatgaaccataatgatgcaagatgttaataattggggagcctgtggaggatgggagggttaaaggtttatatgagaattctctgtactttttgctcaatttttctgtaaccctaaagctgctctaaaaaatgaagtgtattaagtaaataaataagtaaataaccaaccaacc

SEQ ID NO: 2470 - DNA, 5074 bp, Homo sapiens
tcctgtgcgtccccaggtcaccgctcgccctagttcccaggctttggcctccggtgggcgagaatcgcggagcctgcggggctgggcgccgaagagccgggccggcacccaagcgggcgcggggctgtgcgggccaggcggaggctcaagcggggatccccgagcacgacccccggagccgacggcgctggggcccaaggggccggccgggcggtgacgacggcggaggcgaaggggcggcgggacccgggcccggcccgtgtgcgtcctcgacggcccggccccggctccgcaggacggtgagccccagggagacggatctgggctccgggagggacgccccgcctggatttgtcccgtaggcccggcccgggcccctctggagcagaacggccttggtgaggtggacaggaagggacctcgcgagcagacgcgcgcccgcgacagcaatcccgccccggcctgtcgggagcggtggggcagaggctgcggagccccaggaggatctgcctccgctttcacagtcctccagatttttccaagagcagcagaaaatgaataaatccctggggccagtgtcattcaaggacgtggctgtggacttcacccaggaggaatggcagcagctggatcctgagcagaagataacttacagggatgtgatgctggagaactacagcaatctagtttctgtggggtatcacattatcaaaccggatgttatcagcaagttggagcaaggagaagagccatggatagtagaaggagaattcctacttcagagctatccagatgaagtctggcaaactgatgacctaatagagagaatccaggaagaggaaaataaaccttcaaggcaaactgtgttcattgagaccctgattgaagagagaggtaatgttcctggtaaaacttttgatgtagaaacgaaccctgttccttcaagaaaaatagcctataaaaatagcctctgtgactcatgtgaaaagtgtttaacgtctgtttcagaatatattagtagtgatggaagctatgcaagaatgaaagctgatgaatgtagtggatgtgggaaatcactcctccatattaagcttgagaaaactcatccaggagatcaagcttatgaatttaatcaaaatggggaaccttatactctaaatgaagaaagtctttatcagaaaattcgtattttggagaaaccttttgaatatattgaatgccagaaagccttccaaaaggacactgtttttgttaatcacatggaagaaaagccctataagtggaatggatctgaaatagcctttctccagatgtcggacctcactgtacatcagacatctcatatggaaatgaagccctatgaatgcagtgaatgtgggaaatccttctgtaaaaagtcaaaatttattatacatcagaggactcacacaggagagaaaccttacgaatgtaatcagtgtgggaaatccttctgccagaagggaacccttactgtgcatcagagaacacacacaggggagaagccctatgaatgtaatgaatgtgggaagaacttttaccagaagttacacctcattcagcatcagagaactcactcaggagagaagccctatgaatgtagttattgtggaaaatccttttgccagaagacacacctcacacaacatcagagaacacattcaggagagagaccttatgtttgtcatgactgtgggaaaaccttctcgcagaagtcagcacttaatgaccatcagaaaattcacacaggtgtgaaactctacaagtgtagtgaatgtgggaaatgcttctgccgcaagtctactctcacgacccacctgaggacccacacaggagagaaaccgtatgaatgtaatgagtgtggaaaattcttctctcggttgtcatatctcactgtacattatagaactcattcaggagagaaaccctatgaatgtaatgaatgtggaaaaaccttctacctgaattcagccctcatgagacatcagagagtgcacacaggagagaaaccttacgaatgtaatgaatgtggaaagttattctcccagttgtcatacctcactatccatcatagaactcattcaggagtaaaaccctatgaatgtagtgaatgtgggaaaaccttctaccagaactcagccctttgtagacatcggagaatacacaaaggagagaagccctatgaatgctatatatgtggaaaattcttctctcagatgtcatacctcactatacatcatagaattcattcaggagagaagccctatgaatgtagtgaatgtgggaaaaccttctgccagaattcagcccttaatcgacatcagagaacacacacaggagagaaagcctacgaatgttatgaatgtgggaagtgcttctctcagatgtcctatctcactatacatcatcgaattcattcaggagagaaaccctttgaatgtaatgagtgtggaaaagccttctctcggatgtcatacctcactgtacattatagaactcattcaggagagaaaccctatgagtgtactgaatgtggaaaaaaattctaccacaaatcagcattcaacagccatcagagaattcataggagaggcaatatgaatgtaatagatgtgggaaggcttctctgaagtcagacctcattttatatcagagaaccctttcagtatagtgaatcagaaactcctgcctgaagtcaaacaccttgtacatcagagagttcacacaggttagtgtggacatccccttgtgtgttggactcataatctgaagactcacagaatggaaaccatgattataacaagaccacatggtataacaatactagactatagacaagtaaaaatttataaatattaagaatgtatatacatgtcaccatggattggaactgttttgcatatcagggaaatcatagccaaggggaaatctatcagtataaggaatgtggaagacataatcctttggaaactgttaatactaaaagatatgtttctgatacaatagcaaacttgaaaaaaaaaaaagaaatagaagattcctgctgtgaataaacatacttcttgtgtaaatagaaactgtaaagtcatcaggatagctagttaagtcggtaaccttaaactcatgtaagcagttcccaaagaacataggacttatgtttggggagagggttgtttttattacagtacattacaggaattgtatgttcacttcgaatcatgtttgaaaaaacgttgtatccttattttgtaattcatatagtaagagtattctaaacagcactacattaatatcatttgataggtataaagtatactttttcttgcactcttctctaggatttaatgcattgatcattcttaatgaacaatatcagctctaaaggaccaatgcttttataatgttttcaactgtatctgagtcagccagagagataaatatccatgtataaaatagatagaaaactttgcttggtaatttaaaattaataatgccagttttccaagagtgagaaaatcattgcactctatacagttttaagatatacttaaaatattcccatttgtatctatttttttttctactgttttttatttggacacttacataacagtgcagagcacaatgctgtgtaacataggaattcactgtgttttcatttgatgtcgtactggttttaaaccttgtgctctactccttcctgttaatgaattaagaacacattctaacaagggtctgtggcagacattgccgagtgactttctaacataggaattcactgtgttttcatttgatgtcgtactggttttaaaccttgtgctctactccttcctgttaatgaattaagaacacattctaacaagggtctgtggcagacattgccgagtgactttcttagtcactcccttactctgctggcggagtttggttatccatttatcctcaaaaggaagtgagataaatcctgattagttttaaccagtgacactccccttctcgttgccagcagttgatttacagtggtcacagggcccaattctagacataaaacaaaggatatacctgacagactacttctggaaaaggttttctcaaaggcccaaggattcaagcaaagggaagtggaatcttgtggtgaacagtaccttgtctggatgtggtgcctggtaaccatctttcagcaatggattatagtttaatcatggcctgagcagaaatactgaaagaccctgagacctggatgatgtctttgagccaccaaaccaagcagccttgtagccactcctcctttggactgtttcttttgtgagagactaaacttatttttaagccagttgatttaggatgctctattactaataactgaagacattctaattggtacagactgaaacctttataggagttatgcagttcagaagtggactttaggtaagtcatttattttaagctgttgatatagagatttattttctgtaaattttgacgtaaatagtttgagcattagaaatcaacttgaaacaataaaatgtatgcttccttgaactgtcatatcgttgacctgcaaaattcacctttggaacgtgacacaatgttaggcatacctccttttttctaatacatggaatacattttgttggaggtaatttatgtgattcatataccactgctacagtgttagctgacaacatatagtatgaggtaaggatctaattctgtttcctctcacatgattacttgatagctaagcatctgattggtttactgctttaccactgagctgaaatgccgtgttttccatttattaaaatcacacatggctcctgtttttgtcactcagcactttttctccatattcttcaagacgattgtgagtatggtacgtaacaggaattacatctggtaagttgtatagttttgtgtaggaactctatattcatagcatatttgtggaaatgatacctatggaggtttctcacactggtgtgtcattatacattaattgtacaatatgcattttcagtaaaatatttgaaaactgtaaaaaaaaaaaaaa

SEQ ID NO: 2471 - DNA, 3038 bp, Homo sapiens
ggagttaggctcgcgccggcgcagtgtcggctgccggtgccgcggcctttgtctcgcagtcaggaggagcagggccagccgttcctgccagaagccagggcatgacccctggggtgcgcgtctccacagacccggagcaagtgacgtttgaggacgtggtagtggacttcagccaggaggagtgggggcagctgaagcctgcccagaggaccctgtaccgtgatgtaatgctggacaccttcaggcttctggtctctgtgggacattggttaccgaagccgaatgtcatctccctgctggagcaagaggcagagctgtgggcggtggagtctagacttccccaaggcgtgtacccagacttggaaactagacccaaagtcaaactgtcagttctaaagcaaggcatctctgaagaaatatccaacagtgtcatcttggtagaaagattcctgtgggatggtctgtggtactgcaggggtgaggacactgagggccactgggaatggagttgtgagagtctagagagcctggcagtgccggtggccttcacgcctgtgaagacgcctgttctggagcagtggcagaggaatgggtttggggaaaacataagtctgaaccctgatctcccacatcaaccaatgactcctgaaagacaaagcccccacacatggggaacacgtggaaaaagggagaagccagacctaaatgttttacagaaaacctgtgtaaaagagaaaccctacaaatgtcaggaatgcggaaaggcctttagtcacagctcagcacttatcgaacaccaccggacgcacacaggagagagaccttatgaatgtcacgaatgcttaaaaggcttccggaacagctcggcacttaccaaacaccagagaatccatactggggagaaaccctataaatgcactcagtgtgggaggaccttcaaccaaattgccccactgatccagcaccagagaactcacacaggtgagaagccctatgaatgcagcgaatgtgggaaatccttcagttttaggtcctccttcagccagcacgagcgaactcacacaggcgagaagccctacgagtgcagtgagtgtgggaaagccttccggcaaagcatccacctcacccagcatctgcgaatccacactggggagaaaccctatcagtgtggtgagtgtggcaaggccttcagccacagctcatccttgaccaaacaccagcgaatacacacaggggagaagccctacgagtgccatgagtgtggaaaagccttcacccagatcacaccactgattcagcaccagaggacccacacaggagaaaagccctatgagtgtggtgagtgtgggaaagccttcagtcagagcacactcctgaccgagcatcggaggattcacacaggagagaagccctatggatgcaacgagtgtgggaaaaccttcagccacagctcctcactcagccagcatgagcggacacacacaggagagaagccctatgagtgcagtcagtgtgggaaggccttccggcagagcacacacctcacccaacaccagcgaatccacacaggggagaagccctatgaatgcaatgactgcggcaaggcattcagtcacagctcgtccctcaccaaacatcagcgaatccacactggggagaagccctacgaatgcaaccagtgtggcagagccttcagccagcttgctccactcattcagcatcagaggatccacacaggagagaaaccctatgaatgtaaccagtgtggcagagccttcagccagagctcccttctcatcgaacaccagaggattcacaccaaggaaaagccgtatgggtgcaatgagtgtgggaaatccttcagccacagctcctcgctcagccagcacgaaaggacgcacactggggaaaagccctatgagtgtcacgattgcggaaagtcctttaggcagagcacccacctcactcagcaccggaggatccacacaggagagaagccatatgcatgcagggactgtggaaaggcctttacccacagctcctcccttaccaagcaccagagaactcacactggataaacccactccacatgtgctggggacataggaagaccttaagccatagctcatccctttctagatttgacccaatcatacacatgagaaacgtacgttcatacacaagccttttcacacagcactcccctcagacaccctcagagagttcacactgatgggaaatgaccatgggaccaccaagctctaggtcatccatctctgcatccaaatagtagggaaacgtggagataatcaacactcaggaccttcagccttgaacgcccattagtgctatgttatagaacctacaaaaaagaaatggaacaaatgtagtggatccagggaacgcttttgtccaaggattcaccgtattccaaaccagagatgttcaaattggtgagaaacccaacaaatgcctttcatatatacgagaaccaaatgaagtcagaatttgccattattgcacattacatttttgggggggaaagtgcttatgaatggtgcaggttgactctgatattcattcccaaatgacagtatggcagagtgttccagaaatgagagtggcatctttatggaatcactatggatactgactgtctcagtaaacagctgtcttgtctgtgtgtatattgtttgatcagggtacatggcagccagtcacagattggaattacatatgacaaagtatcagtgtactataaacaggtttttagttatccctgcattatttttgcaattaatctttatatgcaatgagattgaaaagctttgtatgggaagactcaaaatgtaaagctgcttccgtagagtctcactgattctgagatggcttttgctgctctgttctccctctacatttctctgcagaactcgcgttagaaacacagatatttgttttacaaaaagggagatttttcctttgttaaaccatcgtcttataagcaatagcaaattcatgttagaaaaaaaaaaaaaaaa

SEQ ID NO: 2472 - DNA, 6234 bp, Homo sapiens
gagaagcccacgccactctaccccagagctctcgatggtgcttctccggcttcagggctggagtgggggtggagggcgggaaaaaccacagagacaaaacatagagtaccccggcagccggcaagaggaagagagagtggcttccacatccccaatatcctagaggcggctgagccggaggcggtcgcacaaagcgggccccgggggccgttccagccgcggccgaccatagagatgcggctcccgccggctctgggtctggagccttccaggttacaaaccgcctttccagttcgctggctcttatgatccagctcctgcccgacgatgtggacactgtcatcacctccattttacagataggaaagctgaggcccagagaagcgaagcgactgtgtctgtccaagaccacgcgccctcctgcccggaagataagcgtatttcttctctggtgcccacctgtctcctacctcaccctgccctcccgcaggtgaaggttcttaatcttgacggctcagcgtcctccttggctccccccggaggccatgtatggtcaagcttgaagattccccagaacagcgataatattcacatttaagaagccaaaacacacaagtcggtggtgatgacagacccccttttggactcacagccagccagtagcaccggggagatggatggactgtgccctgagctattgctgatccccccgcctctctctaaccgtggaatcctggggcctgtccagagcccctgtccttcccgggaccctgcacctatacctactgagccaggctgcctgctggtagaggccacagcaactgaagagggaccagggaacatggagatcattgtggagacagtagctggaaccctgaccccaggtgctcctggagagaccccagccactgcagcttcataggctccaacgtcaaactcttccggcagcatcagcggagccatggtgctgggacacagggagaactttctgccgttcagggccttccatcccaggagctgctgccagctcccaaactgcctccaggagagagagaaccttcacaggaagcaggtacacccttgcctgggcaggagacagctgaagaggagaatgtagagaaagaagagaagagtgacacccagaaggactcccaaaaggctgtggataaaggccaaggggctcagcggctggaaggggatgtggtctctggcaccgagtccctcttcaagacccatatgtgtccagagtgtaagcgctgctttaagaagcggactcatctggtggagcacctgcatctccacttcccagaccccagcctccagtgccctaactgccagaagttcttcaccagtaagagcaagctcaagacccatctgctgcgggagctgggtgaaaaggcccaccactgcccactgtgccactacagtgcggtggagaggaatgcactcaaccgccacatggccagcatgcatgaagatatttccaacttctactcagacacctatgcctgtcctgtctgccgtgaggaattccgcctcagccaggccctaaaggagcacctcaagagccacacggcagcagccgcagcagagccattaccccttcgctgctttcaggagggctgcagctatgcagcacccgaccgcaaggccttcattaagcacctgaaggagacccatggggtgcgggctgtggagtgccgccatcactcatgtcccatgctctttgccacagccgaagccatggaggcccaccacaagagtcactacgccttccactgcccccactgtgattttgcttgttccaataagcacctattccgtaaacacaagaagcagggccaccctggcagtgaagagctgcgctgcaccttctgcccctttgccaccttcaacccagtggcttaccaggatcatgtaggcaagatgcatgctcatgaaaagatccaccagtgtcctgagtgcaactttgccactgcccacaagagggtgctcatccgacacatgcttctacatacgggtgagaagccccacaagtgtgagctgtgtgacttcacatgccgagacgtgagctacctatccaagcacatgctgacccactccaacaccaaggattacatgtgcactgaatgtggctatgtcaccaagtggaagcactacctccgtgtgcacatgcgaaaacatgcaggggacctcaggtatcagtgcaaccagtgctcctatcgctgtcaccgggctgatcagctgagcagccacaagctgcggcatcagggcaagtctctgatgtgtgaggtgtgtgccttcgcctgcaagcggaagtatgagctgcagaagcacatggcttcccagcaccaccctggcacaccggccccactctacccttgccactactgcagttaccagagccgccacaagcaggctgtgctgagccatgagaactgcaagcatacccgcctccgtgagttccactgtgccctctgtgactaccgcaccttcagcaacaccacactcttgttccataaacgcaaggcccatggctatgtacctggagaccaggcctggcagctccgctatgcaagccaggagccagaaggggccatgcagggcccaacacccccaccagattcagagccctcaaaccagctgtcagcccgacctgaggggccaggtcacgaacctgggactgtggtggaccccagcttggaccaggccctgccagagatgagtgaggaggtcaacactggaagacaggagggcagtgaggctccccatgggggtgacctgggtggcagtcccagcccagcagaggtggaggagggcagctgcacactacacctagaggccctgggagtagagctggagtctgtgactgagccaccccttgaggaggtcactgaaacagcccctatggagttcaggcccctgggactggaagggccagatggactggaaggaccagagctatctagctttgaaggtattgggacttctgacttgagtgctgaagaaaatccccttctggaaaagccagtgtctgagccctccacaaatcctccatccttagaggaggctcctaacaactgggtaggaaccttcaagacaactccacctgctgagacagcacccttgcccccattacctgagtcagagtcattactcaaggccctaaggagacaggacaaagaacaagcagaggcattggtgctagaggggcgggtgcagatggtagtgatccagggagaggggcgagccttccgctgcccacactgcccttttatcactcgccgggagaaggccctgaatctgcactccaggactgggtgccaaggccgccgagagcccctgctgtgccccgagtgtggggctagcttcaagcaacaacgcggcctcagcacccacctgctgaagaagtgccctgttctactcagaaagaacaagggcttgcccagaccagattcacccatccctctgcaacctgtgctcccaggtacccaggcctcagaggacacagaaagtgggaagcccccacctgcatcacaagaagcagagctactgcttccaaaagatgctcctttggagcttcccagggagccagaagaaacagaagagcctcttgccacagtctctggttccccagtccctcctgcaggaaactccttgcccacagaggcccctaagaagcactgctttgacccagtccctcctgcaggaaactcctcacccacggaggcccctaagaagcaccaccttgacccagtccctcctgcaggaaactcctcacccacagaggccctgaagaagcaccgctttgagcagggcaagtttcactgcaactcctgcccattcctttgttcccggctctcctctattacctctcacgtggctgaaggctgcagggggggacgtggcgggggaggaaaacgagggaccccccagacccagcctgatgtgtccccgttgagcaatggggactctgctcccccgaagaatgggagtacagagtccagctctggtgatggggatacagttctggttcaaaagcagaagggggctcgcttctcctgccctacatgtccctttagctgccagcaggaacgggctctgaggactcaccagatccggggctgccccctcgaggagtctggagagctgcactgcagcctctgcccattcactgctcctgctgccactgccttaaggctccaccagaagcggaggcaccccactgcagccccagcccgtgggccccggccccatctacagtgtggggactgtggcttcacctgtaaacagagccgttgcatgcagcagcaccggcggctcaagcacgagggggtgaagccccatcagtgccccttctgtgacttttcgaccaccagacggtaccggttagaggctcaccagtcccgacacacaggcattggccgcatcccctgcagctcttgcccccagacgtttggtaccaactcgaaactgcgcttgcaccggttaagggtacatgacaaaacacctacccacttctgtccactttgtgactatagtggctaccttcgccatgacatcactcgtcatgtcaacagctgccaccaaggcaccccagcctttgcctgctcccagtgtgaagcccagttcagctcagagacagcacttaagcagcatgctctgcgccgacaccccgagcctgcacagcctgcccctggctctcctgcagagaccactgagggccccctgcactgttcccgctgtgggttgctgtgccccagccctgccagcttacgaggacacacccgtaaacagcacccacggcttgagtgtggggcctgccaggaggccttccctagccgactggctctggatgagcaccggaggcagcagcatttcagccaccgctgtcagctctgtgactttgctgcccgggagcgggtgggcctggtaaagcactacctggaacagcatgaggagacttcagcagccgtggcagcctcagatggggatggggatgctggccagcccccgctacactgccccttttgtgacttcacatgccgccatcagctggtactagatcaccatgtgaaagggcatgggggcactcgtctctacaagtgcaccgattgtgcttacagcaccaagaaccgacagaagatcacctggcacagccgcatccacactggggaaaagccttaccactgtcacctctgcccctatgcctgtgctgatccctctcgtctcaagtaccacatgcggatccacaaggaggaacggaagtacctgtgccctgagtgtggctacaagtgcaagtgggtcaaccagctgaaataccacatgaccaagcatacaggactgaagccataccagtgtcccgagtgtgagtactgcaccaaccgggctgatgcactgcgtgtgcaccaggagacccggcatcgagaagcacgggctttcatgtgtgagcagtgtggcaaggccttcaagacgcgcttcctgctgcgcacccaccttcgcaagcacagtgaggccaaaccctatgtgtgcaatgtgtgccaccgtgctttccgctgggctgctggcctgcgccatcatgccctcacccacaccgaccgccaccccttcttttgccgcctctgcaactacaaggccaagcaaaagttccaggtggtcaagcacgtacgcaggcaccaccctgaccaagccgacccaaaccagggtgtgggcaaagaccccaccacccccacagtgcacctgcatgatgtgcagctggaggatcccagccctcctgctcctgccgctccccacactggacctgagggctgaaagcctgccccacctcctgtataggaagagggtatggtctgagatgtgcagactgggaccagcgctagcctgaggagctcagagcctaaggaaagactggcttttggggtacaagggtgactagaaccttcctgggactctggctatagtactttgaaattatcacccatataaaagagggacatggactataacgttgatttcttattgctgtacattgcgtttttaacctgcaagttctcagtttcttcaccatcactccatcaaagtccctggctataagatctggattttacccactccatcttctctttccttcttactgtgtcaattcctattttctttcagaatcttctaaaaacagttgtatctaaccgcatgtgctgttgtgcctaatgctctataaagcatgttaaacagaaa

SEQ ID NO: 2473 - DNA, 2417 bp, Homo sapiens
gcagcagagaggagttgagggcgatgagagcgggtactgcgaactgccgggcgatgctgtcgctgccgccgtgatacggagagcaacagttccccagcaacacccctccccgacacaggcacacaccccccgacaggcacgcacacccaccccacagtgcccggctcggctgcgcctcctctattggcccaggaagcccacccagccccgccacgcagagcccagaaggaaagaaagcctcatgcctgagccgaggggagcaccatggatctgacaaaaatgggcatgatccagctgcagaaccctagccaccccacggggctactgtgcaaggccaaccagatgcggctggccgggactttgtgcgatgtggtcatcatggtggacagccaggagttccacgcccaccggacggtgctggcctgcaccagcaagatgtttgagatcctcttccaccgcaatagtcaacactatactttggacttcctctcgccaaagaccttccagcagattctggagtatgcatatacagccacgctgcaagccaaggcggaggacctggatgacctgctgtatgcggccgagatcctggagatcgagtacctggaggaacagtgcctgaagatgctggagaccatccaggcctcagacgacaatgacacggaggccaccatggccgatggcggggccgaggaagaagaggaccgcaaggctcggtacctcaagaacatcttcatctcgaagcattccagcgaggagagtgggtatgccagtgtggctggacagagcctccctgggcccatggtggaccagagcccttcagtctccacttcatttggtctttcagccatgagtcccaccaaggctgcagtggacagtttgatgaccataggacagtctctcctgcagggaactcttcagccacctgcagggcccgaggagccaactctggctgggggtgggcggcaccctggggtggctgaggtgaagacggagatgatgcaggtggatgaggtgcccagccaggacagccctggggcagccgagtccagcatctcaggagggatgggggacaaggttgaggaaagaggcaaagaggggcctgggaccccgactcgaagcagcgtcatcaccagtgctagggagctacactatgggcgagaggagagtgccgagcaggtgccacccccagctgaggctggccaggcccccactggccgacctgagcacccagcacccccgcctgagaagcatctgggcatctactccgtgttgcccaaccacaaggctgacgctgtattgagcatgccgtcttccgtgacctctggcctccacgtgcagcctgccctggctgtctccatggacttcagcacctatggggggctgctgccccagggcttcatccagagggagctgttcagcaagctgggggagctggctgtgggcatgaagtcagagagccggaccatcggagagcagtgcagcgtgtgtggggtcgagcttcctgataacgaggctgtggagcagcacaggaagctgcacagtgggatgaagacgtacgggtgcgagctctgcgggaagcggttcctggatagtttgcggctgagaatgcacttactggctcattcagcgggtgccaaagcctttgtctgtgatcagtgcggtgcacagttttcgaaggaggatgccctggagacacacaggcagacccatactggcactgacatggccgtcttctgtctgctgtgtgggaagcgcttccaggcgcagagcgcactgcagcagcacatggaggtccacgcgggcgtgcgcagctacatctgcagtgagtgcaaccgcaccttccccagccacacggctctcaaacgccacctgcgctcacatacaggcgaccacccctacgagtgtgagttctgtggcagctgcttccgggatgagagcacactcaagagccacaaacgcatccacacgggtgagaaaccctacgagtgcaatggctgtggcaagaagttcagcctcaagcatcagctggagacgcactatagggtgcacacaggtgagaagccctttgagtgtaagctctgccaccagcgctcccgggactactcggccatgatcaagcacctgagaacgcacaacggcgcctcgccctaccagtgcaccatctgcacagagtactgccccagcctctcctccatgcagaagcacatgaagggccacaagcccgaggagatcccgcccgactggaggatagagaagacgtacctctacctgtgctatgtgtgaagggaggcccgcggcggtggagccgagcggggagccaggaaagaagagttggagtgagatgaaggaaggactatgacaaataaaaaaggaaaagaaaaaaaaaaacagaaggaaaaggaaaaaaaaaaaaa

SEQ ID NO: 2474 - DNA, 2262 bp, Homo sapiens
gcgctcccggccgctctcgcctcctctattggcccaggaagcccacccagccccgccacgcagagcccagaaggaaagaaagcctcatgcctgagccgaggggagcaccatggatctgacaaaaatgggcatgatccagctgcagaaccctagccaccccacggggctactgtgcaaggccaaccagatgcggctggccgggactttgtgcgatgtggtcatcatggtggacagccaggagttccacgcccaccggacggtgctggcctgcaccagcaagatgtttgagatcctcttccaccgcaatagtcaacactatactttggacttcctctcgccaaagaccttccagcagattctggagtatgcatatacagccacgctgcaagccaaggcggaggacctggatgacctgctgtatgcggccgagatcctggagatcgagtacctggaggaacagtgcctgaagatgctggagaccatccaggcctcagacgacaatgacacggaggccaccatggccgatggcggggccgaggaagaagaggaccgcaaggctcggtacctcaagaacatcttcatctcgaagcattccagcgaggagagtgggtatgccagtgtggctggacagagcctccctgggcccatggtggaccagagcccttcagtctccacttcatttggtctttcagccatgagtcccaccaaggctgcagtggacagtttgatgaccataggacagtctctcctgcagggaactcttcagccacctgcagggcccgaggagccaactctggctgggggtgggcggcaccctggggtggctgaggtgaagacggagatgatgcaggtggatgaggtgcccagccaggacagccctggggcagccgagtccagcatctcaggagggatgggggacaaggttgaggaaagaggcaaagaggggcctgggaccccgactcgaagcagcgtcatcaccagtgctagggagctacactatgggcgagaggagagtgccgagcaggtgccacccccagctgaggctggccaggcccccactggccgacctgagcacccagcacccccgcctgagaagcatctgggcatctactccgtgttgcccaaccacaaggctgacgctgtattgagcatgccgtcttccgtgacctctggcctccacgtgcagcctgccctggctgtctccatggacttcagcacctatggggggctgctgccccagggcttcatccagagggagctgttcagcaagctgggggagctggctgtgggcatgaagtcagagagccggaccatcggagagcagtgcagcgtgtgtggggtcgagcttcctgataacgaggctgtggagcagcacaggaagctgcacagtgggatgaagacgtacgggtgcgagctctgcgggaagcggttcctggatagtttgcggctgagaatgcacttactggctcattcagcgggtgccaaagcctttgtctgtgatcagtgcggtgcacagttttcgaaggaggatgccctggagacacacaggcagacccatactggcactgacatggccgtcttctgtctgctgtgtgggaagcgcttccaggcgcagagcgcactgcagcagcacatggaggtccacgcgggcgtgcgcagctacatctgcagtgagtgcaaccgcaccttccccagccacacggctctcaaacgccacctgcgctcacatacaggcgaccacccctacgagtgtgagttctgtggcagctgcttccgggatgagagcacactcaagagccacaaacgcatccacacgggtgagaaaccctacgagtgcaatggctgtggcaagaagttcagcctcaagcatcagctggagacgcactatagggtgcacacaggtgagaagccctttgagtgtaagctctgccaccagcgctcccgggactactcggccatgatcaagcacctgagaacgcacaacggcgcctcgccctaccagtgcaccatctgcacagagtactgccccagcctctcctccatgcagaagcacatgaagggccacaagcccgaggagatcccgcccgactggaggatagagaagacgtacctctacctgtgctatgtgtgaagggaggcccgcggcggtggagccgagcggggagccaggaaagaagagttggagtgagatgaaggaaggactatgacaaataaaaaaggaaaagaaaaaaaaaaacagaaggaaaaggaaaaaaaaaaaaa

SEQ ID NO: 2475 - DNA, 4652 bp, Homo sapiens
gtggccgcgctcggcgctgccatgttgaggagccgccgctgccgttgccgccgccgccgccgccgctttgttgtcgcctcctccggctgaggaggctccccgagcggggggagtggggaggaggggggtcggccgccgcagccatggaggccaactggaccgcgttcctgttccaggcccatgaagcttcccatcaccaacagcaggcagcacagaacagcttgctgcccctcctgagctctgccgtggagccccctgatcagaaaccattgcttccaataccaataactcagaaacctcagggtgcaccagaaacattaaaggatgccattgggattaaaaaagaaaaacccaaaacttcatttgtgtgcacttactgcagtaaagctttcagggacagctatcacctgaggcgccacgaatcctgccacacagggatcaagttggtgtcccggccaaagaaaacccccaccacggtggttccccttatctctaccatcgctggggacagcagccgaacttcgttggtctcgaccattgcaggcatcttgtcaacagtcactacatcttcctcgggcaccaaccccagtagcagtgccagcaccacagctatgccagtgacccagtctgtcaagaaacccagtaagcctgtcaagaagaaccatgcttgtgagatgtgtgggaaggccttccgagatgtgtaccatctcaatcgacacaagctctcccattcagatgagaaaccctttgagtgtcctatttgtaatcagcgcttcaagaggaaggaccggatgacttaccatgtgaggtctcatgaaggaggcatcaccaaaccctatacttgcagtgtttgtgggaaaggcttctcaaggcctgaccacttaagctgtcatgtaaaacatgtccattcaacagaaagacccttcaaatgccaaacgtgcactgctgcctttgccaccaaagacagactgcggacacacatggtgcgccatgaaggcaaggtatcatgtaacatctgtgggaagctcctgagtgcagcatacatcaccagccacttaaagactcatgggcagagccaaagtatcaactgtaatacatgtaaacaaggcatcagtaaaacatgcatgagtgaagagaccagtaaccaaaagcagcagcagcagcagcagcagcagcagcagcagcagcaacaacaacaacaacaacatgtgacaagctggccagggaagcaagtagaaacactgagactgtgggaagaagctgttaaagcaaggaagaaagaagctgctaacctgtgccaaacctccacggctgctacgacacctgtgactctcactactccattcagtataacatcctctgtgtcgtctgggactatgtcaaacccagtcacagtggcagctgcaatgagcatgagaagtccagtaaatgtttcaagtgcagttaacataaccagcccaatgaacatagggcatcctgtaactataaccagtccattatccatgacctctcctttaacactcactaccccagtcaacctccccacccccgtcactgccccagtgaatatagcacaccctgtcaccatcacatctccaatgaatctacccacacctatgacattagccgcccctctcaatatagcaatgagacctgtagagagcatgcctttcttgccccaagctttgcctacatcaccgccttggtaaacagtattataaaatcaaaatatgggtaaaagtaaatatttaccagcaacttaacttttagttgattaaagcaaaaagtaaaccatgaaattgggagattttattacattagttaataagagtgtggtagcatttttctccaatttggctgggattattcaaagtagggtgtgtatgtaacttatcactggaccactttagtttaatcagaaattccttttagctgacaacattgcttaaacaggatagtagttggcaagatgaaatgccagaattaaaaccaatcataagtagaacccacttcaaaataaaaaaacagcattactatttctaatcccaaggaatcactttattgtaaacactagcagaactcttctccctatacaaggtggatggctgattttaacctgaaattttaaatccacagattgagagctagtgtagaattgtctgtgtttattgtttttatgagtaaatacatgcattgtcataataaaatgcatttcagagaatatgcattttacctttgggaatatgttaatttcaggcagcattccctatgggaaaggtgataccagctctgatatgcaaagcatatgataatttatcattctaacttcaacgtataatagggattgtgacctgatatttggagatgtaaatattgctcagcatattaatcccgatggaatatagcattgtagttgactttttaaaaaaaaaaaaaatttaaaaaaaatctacaaattgtgttttgctaagaaaagcctcaactgacagaggagaagtcaagtgtgtggacaggcaagctcctaataaacagagtccagtgggattcctatttaggagccaaggagtactttggaacagtacaaatatattgctttaaattggaagacgctggaggcactgggatgtgatatgcccctctctctcccaatcagagcctgttgatattacaacagggacagatgtgttagttgctcactagagtttatgtcttatattaaattgtatacagtttttattctaaccactaactaggtagtgtatgccccttcagaacatgcagagtgtatctttttttaaatttctccttccgtttcttaagtattgcgcagatttgttcaactttgtaaatatggacatcactttttttttctttgagaaaacacttgtatcagctttgtggtgttttcagggagacagctgtctgcattccctgtagaaacccagcaatgattatgcacgttgagacatgtgctttttatttcttagcaagatattttatctctgtacataaagtagaaaccaaaagctagggaaacagatactctttacaccatcatgccacgcattgtttttaaagcattgcgttaaaaaaaaaattaactaaaccaagatgctgtgattttttaagttgcaatatgtttttggtttttttcattttttaatcattgcagttaagagaaatggaaattagttgtgttaatcttgcagaatgtttgcaggactgactatcaaactggatgatttccatttataccctactgtgtcagttcaagcatcaaaataccttgcatctgagacagacttcctacatcagggacaggtatctgtgtgtcattatacaaaacagttctagggggttgaactacatagtaaaaaaataaaataaatagtacttagtgtaaaataattttataaatgatcttttgtactttaggacattaaattgtacaacttttgtatatataaaagcttaggaactttctgtttagcaggaaggcaacacattcctacacttttaatgtatatgtttgttataatgtccatgtaaacatgccctatgtttgtgccttttaattagtttgtctcaataaacaaaatgtagagaaaaatatgtagctatgactttgttacaactgttcttatccacagtacaaaaatggtttgtttttaatatgtagagcattatgtgtggactactggaaggactcgtgtagggaaagcccaagaatgaccttgctgaggcctggattgggaggcacagtggccacatttggaggaagttcacatttcctggcatgcagacccaaaactgggttctggctctgcctgctgggatctgttatctctggtgggctggcagtcataattcacaattcagacagcccaggcttcctccacagtggtccaaggagcagtcctcagtgggggcaggtgtgggccctacccctaagctagaatgtggttgtcagaaccctgaaagtattagttctaaaaaaaaaaagatatatactagaagtaattgttttatcaattcattgtataataaacaggagtgagacttcattgtatgacttcagttaaaatactattttgtatgcattctttattcacttaagaagcttgtctgcaataataaagccacgtcatgtcttcttttgggagggagagagtcgatggcaggagggggttttgggtgggccactgaaaaggggtaccgaataggttgtgtgatgaaattctgtgtcttggaactggaattgagtttcgatgttgatgaactgattcaaccaggtgttgaaggcacgacagccactgctctacgaaaaggcagagtacgtttttcccttctggttgtaacctggttgagagcttcccctttatcagattggcagctaaacagttgtattagataatccttaaatctgacatccagcctgttacgctctagggctcgctgcttggcctgcgtttgctttttattgtgtatccgttcccctcctacggtgtgctcctgaatgaaggtttctatgtaagcagatgatgattttacctgtcaataccagcactgtattactaacatgcaaaatactgcagatttattttgaaaattaaagttaactggtcacaaatgtaaaaaaaaaaaaaaaaaaa

SEQ ID NO: 2476 - DNA, 2678 bp, Homo sapiens
gcaacgcctcctggggttgtcaatatggctgcgttgggatctgttcaccttcaggctgagtcgagactgaggtgaaaaagcggaaaaacgcgagaaaaggtttccccgttgtacagaggctagagtgaggctcggttgaatcggttgcaggcgttggtgcctctgtcagcgtccaggtcactgccgctcccgccccgctcttccctggctgtgctggcggaggctgcgccgatgaacctgactgaggattatatggtttttgaggacgtggccatacatttctcccaggaggagtggggaattcttaatgacgttcagagacacctgcacagcgatgtgatgctggagaactttgcacttttgtcctcagtaggttgttggcatggagccaaggatgaggaggcaccttccaagcaatgtgtttctgtaggagtgtcacaggtcacaactttaaagccagctttgtccacccagaaggcccagccctgtgagacatgtagctcacttctgaaggacattctacacctggctgagcatgacggaacacaccccaagcgtacagccaagctttacctgcaccaaaaggagcatcttagagagaagctcaccagaagtgatgaagggaggccttcgtttgtgaatgacagtgttcacctggcaaagaggaacctcacatgcatgcagggtggcaaggattttactggtgattcagatcttcaacaacaggctcttcacagtgggtggaagccacacagggacactcatggtgtggaggcctttcaaagtggacagaataattacagctgcacccaatgtgggaaagacttttgccaccaacatacactgtttgagcaccagaaaatccacacagaggaaaggccttatgagtgcagtgaatgtggcaaattgtttaggtacaactccgaccttattaaacatcagcgaaatcatactggagaaaggccttataagtgtagtgaatgtggaaaagccttcagcctcaaatacaatgttgttcaacaccagaaaattcacactggagaaaggccttatgagtgcagtgaatgtgggaaagcttttcttagaaagtctcacctacttcagcaccagaggattcacaccaggccaaggccttatgtgtgtagtgaatgtgggaaggccttccttacacaggctcaccttgttggtcaccagaaaattcatactggagaacggccttatggatgcaatgaatgtgggaaatactttatgtacagttcagcactcattagacatcagaaagttcacactggagaaaggcctttttattgctgtgaatgtgggaaattctttatggacagctgcacactcattattcaccagagagttcatactggagaaaaaccttatgaatgcaacgaatgtgggaaattctttagataccgttccacactcattagacatcagaaagttcacactggagaaaagccttatgagtgtagtgaatgtgggaagttctttatggacacttccacactcattattcatcagagagttcatactggagaaaagccttatgaatgcaacaaatgtgggaaattctttaggtattgcttcacactgaatagacatcagagagttcactctggagagaggccttatgaatgcagtgaatgtggcaaattctttgtggacagctgtacactgaagagtcatcagagagttcacactggagaaagaccttttgaatgcagcatttgtgggaaatcctttagatgtcgctccacacttgatacacatcagagaattcacactggtgaaaggccttatgagtgtagtgaatgtgggaaattctttaggcacaactcaaatcatattagacatcggagaaatcactttggagaaaggtcttttgagtgcactgagtgtgggagagtttttagccaaaattcccacctcattcggcaccaaaaagttcacactagggaaagaacttacaaatgcagcaaatgtgggaaattttttatggacagctccacactcattagtcatgagagagttcatactggagaaaagccttatgagtgcagtgaatgtgggaaagtctttagatacaactccagcctcattaaacatcggagaattcacactggagagagaccttatcagtgcagtgaatgtggaagagtctttaaccaaaattctcatctcattcagcaccagaaagttcacaccagataaagaatgtatatataaagcagatggggaaagacttcacacagaaatctactctgatttagcactgggacctacgttttaaaaaaagtattcttgtagaatacagataacataaaatctaacatcttaaccatgttaaagtgtatagttcagtactgttaagtcattcacattgtgcaatgaatatctagaagtcttttcaacttatgaaactaagtctataccttttaaaaccttattcctcactccatccagcctcttgacaagcaccgctctgtatgaattttactagtccgggtacctcatataagaaaacttaagttttggtcttcttgtggtttattttgtggcttattttgcttaacgttatatttttaaggtttcatgttctaatccattagaatttccatcctttttaaaggctgaataaaattctgttagtcatgtgttgcttaacagtg

SEQ ID NO: 2477 - DNA, 4338 bp, Homo sapiens
agtattctcggctcggccattattctgtgcctcggctgccggaagggctcgttcctgtgtcatctcctagcggcctggcgccgaggcggcggtacgcaaggctggagccgcagcgggagcccccgatgatactctccaagctgtaaggaagaagtcaaggattaaggagacctggactggagaggagcctttttcaaaaaacaacaatgacaagagaaaatgtagcccacaatgctctgagacaagagggccttgtgaaggggaaggatgatacctggaaatggggaaccagcttccaaggaagtagctcctctgtttgggagacctcccacctacactttagacaattacgttaccatgagacatctggaccccaggaagccctgagccggctcagggaactctgtcgccggtggctgagaccagaagcacgcaccaaggcacagatcctggagctgctggtgctggagcagtttctgagcatcctgcctggggagattcggacctgggtacagctccatcaccctggaagtggcgaggaggctgtggccctggtagaggagctgcagaaagaccttgatggaccagcaatacaagttccagtccttgtcaaggatcaggacactctccagaaggtggtgagtgccccaggaacaacacttcctcctgtacttcctggcagccacatagcagctgaaatttgcccgcatcctcctactgacctagtggcattcaacctccaggatcctcagcatgattctcctgcccctgaagcttctgccctttcccaggaagagaacccaagaaatcaattaatggcacttatgctcctaacagcccagccccaggagttggtgatgttcgaggaggtgtcagtatgcttcacttcagaggaatgggcatgtctgggcccaatccagagggccttgtactgggatgtgatgctggagaattatggaaatgtgacctccctagaatgggagaccatgaccgagaatgaggaggtgacatcaaagccaagtagttctcaaagagcagactctcataaaggaacatcaaaaagacttcaaggaagtgttccccaggtccttgattttgaagaagagtgtgaatggcaagttttggcaagtcagtggggaaatgaaacagatgaaagggcagatacagtgaagaaagtttccctttgtgaacgagacaagaagaaaaggactccaccagagaaacaaggccaaaagtggaaggaattaggagacagcttgactttcggttcagctatttctgaaagtttaataggtactgaaggaaagaagttttataaatgtgatatgtgttgtaaacattttaataaaatctcccatcttataaaccatcggagaatccacactggtgagaaacctcataaatgtaaggaatgtggaaaaggctttattcagcgttcgagccttctaatgcatttacggaaccattcaggggagaaaccttataaatgtaatgaatgtgggaaagcattttctcaaagtgcttaccttctaaaccatcagaggatccacactggggagaaaccttataagtgtaaggagtgtggaaagggcttctataggcactcaggcctaattatacatctaaggcgccattcaggggagagaccttataagtgtaatgaatgtgggaaagtcttctctcagaatgcttacctcattgaccatcagaggctccacaaaggggaagaaccttataaatgtaataagtgtcagaaagctttcattctgaagaagagcctcattctgcaccagagaatccactctggggaaaaaccctataaatgtgatgaatgtggaaagacctttgctcagaccacttatcttattgaccatcagcgactccacagtgcagagaacccttacaagtgtaaagaatgtggaaaagttttcattcgaagcaaaagcctcctcttacatcagagagtccacacagaaaagaaaacctttggttgtaaaaagtgtgggaagattttcagttctaagtcaaacttcattgaccataagaggatgcacagcagagagaaaccttacaaatgcactgaatgtgggaaagcctttactcaaagtgcttacctttttgaccaccagagactccacaatggggagaagccctatgaatgtaatgaatgtgggaaagtttttattctgaagaagagcctcattttacatcaaaggttccacactggagagaatctctatgaatgtaaagattgtggtaaggtcttcggttcaaacagaaacctcattgaccatgagagactccacaatggggagaagccatatgaatgtcgagagtgtgggaaaacctttattatgagcaaaagttttatggtccatcagaaactccatacacaagagaaagcctacaaatgtgaggattgtgggaaggctttcagttacaattcaagcctgcttgtacatcggagaatccacaccggagaaaaaccctttgaatgcagtgagtgtggaagagctttcagttcaaacagaaacctcattgagcataagagaatccacagtggtgagaaaccctatgagtgtgatgagtgtggcaaatgcttcattctgaagaaaagcctcattggacatcagagaattcacacgagggaaaaatcttataaatgcaatgactgtgggaaggtcttcagttaccgctcaaaccttatagcccatcagaggatccatactggtgagaagccctatgcgtgtagtgagtgtggaaaaggttttacgtacaacagaaacctgattgaacatcaaagaattcacagtggagaaaaaacctacgaatgtcatgtatgtaggaaagtccttacctctagtagaaatcttatggtacatcaaagaatccatactggagagaaaccttataaatgtaatgagtgtggaaaagactttagtcagaataaaaaccttgttgtacatcagagaatgcacactggggaaaaaccttatgagtgtgacaagtgtaggaaatcctttacttctaagaggaatttagttggccaccagagaattcacacaggggagaaaccctatgggtgtaatgattgtagtaaagtttttaggcaaagaaaaaaccttactgtacatcagaaaatccacacagatgaaaaaccttgtgaatgtgatgtgtctgaaaaagaattctctcagacttccaaccttcatcttcaacagaaaatccataccattgaggaattctcttggctacaaaacaccaatgagtccaagattgagattcagaaaatctagtgtcatatgtaaaatggaatagaatccctgcctacttaagtaactgttggacaaatgatatatatttcttctaaggaaaaagtttattatttactctttactagacaaatgagtagcatatagaagaaagttaataggccgggcttggtggctcatgcctgtaatcccagcactttgagaggccgaagcgagtggatcacctgaggtcaggattttgagaccagcctgaccaacatggtgaaaccccatctctactaaaatacaaaaattatccgggcatgggggcacacaccggtaatcccagctactcaggaggctgagacaggagagtcgcttgaacctgggagggcggaggttgcagtgagccaggatcgcgccattgcactccagcctgggcaacaagagcgaaactcttgtctgaaaaaataaagttcatcccaactttcaagtctacaaaaacataatccaaatctaataacatagttgtaaatgagagcaacaataaaaagtagacatgggctgggtgcagtggctcactcctgtagtcccaggactttgggaggccgaggtgggaagatcccttgagcccaggagttcgagacaagcctgggtaacacggggagacccgtctttagtaaataaaaataaatttattaataaaactaaaaatttaataataaaaagtggacattgttttttaaaatgtgtatagtatgcattttaaagatagtgtcactgctgtggaaaacctgaacagacagtatgatccagaatgtcaggtgtggagttgggcggacaagagtctgctgatgaggacaacctaaaagagcactggatttggaatcagaagacctacctttgattcctggctttcccttaatggccatgtgatgttattaagtcagcctctaaagctttagtttcctgtcagtcaaatgttgacatgatacctacctcacagggttgttgtgagggttaagtgaaaggatctttgtgaaagtactttttgaaatcattcagttgtcaataaagttggataaaa

SEQ ID NO: 2478 - DNA, 3130 bp, Homo sapiens
cagcccgtcgtggatgactagagccaaccacctgccttccgtcttccaggcagaaccacagagaggctacagccgtcctggcctccctccggccctgagagctcctctggcctgtctcaagtcttaacgtctcaagcgcagactgccggctccgaacggggagaccaggcttctgcaccggaaacaaggcaccggttgtgacgtcacagccgcagagcgcccgacttcccagaaggcaccgagtccctgccgttctcctcaactggcggcggcgcgaacgaatagtcgccggcgacctcttggctctctggcagatttcctctagtaagaggtggctctggaggccccgcgaaacgagtgtggtgtgtggttgcaaggcatgatggctgcaaaagtggttcctatgcccccaaagccaaagcagtcctttatactgagagttccgccagactccaagctgggccaagacctacttcgagatgccactaacgggcccaagaccatccaccagctagtgctggagcacttcctcaccttcttgcccaagccaagcctggtccagcccagtcagaaagtcaaggagaccttggttattatgaaagatgtgagctcaagccttcagaacagagtgcatcctcgtcccttggtgaagcttctgcccaaaggagtccaaaaggaacaagagacagtgtctctgtatttgaaagctaaccctgagctggtggtctttgaggatttgaatgtatttcactgccaggaagaatgtgtgagcttggatcctactcaacaactcacgtcagagaaggaagatgacagcagtgtcggggaaatgatgttactggcagtcaatggcagtaatcctgaaggtgaagatcctgagagggaacctgtagaaaatgaagattatagagaaaagtcttcagatgatgatgaaatggattcttccttggtctctcagcagcctcccgataaccaggaaaaggaacgactaaatacatccattccacaaaaaaggaaaatgagaaatctgttagttaccattgagaatgatactcctctagaggaactctcaaaatatgtagacatcagtattattgcccttactcgaaatcggaggacaaggagatggtacacttgtccactgtgtgggaaacagtttaatgaaagttcttacctcatttcccaccagaggacccacactggagaaaaaccctatgactgtaatcactgtgggaaaagcttcaatcataaaacaaacctcaataaacatgagcgaattcatacaggagagaaaccttattcctgttctcagtgtggaaaaaacttccgtcagaattctcatcggagtcgtcatgaaggaatccatataagggagaagatatttaagtgtccagaatgtgggaaaaccttcccaaagaatgaggagtttgtgcttcatctgcagagtcatgaggctgagagaccatatggttgcaaaaaatgtgggagaagatttggtcggctgtcaaactgtacccggcatgagaaaacccactcagcctgtaagacccgaaagcagaagtaatactgggaaccctttctgggtctgatggtgctgcctcaacctgagagctttcataagtagttctgaattcccaagctgcctaaaaaggtataaatgtgtaaaaatctcattattgccaaaattggataaatgcccatcttagctaaaacctcaaattgctagaaaattcacagggaagaaaacatttcaagggctatacctcagcatctaggctttttggactaaggagctttcctttttgaagttatatgataatgtacaggtcacagatcccctttcccaacactttgaagatgaatctggagtctgcttacttggaaggcaaagagtgacttgtgtctattgaaagtatatccgttttccccccacatggggattcatacttgagaaatagtgcaaagatgcttatctggaactgtgttctggtgaaagaaccaaattactggcttgttagccaacagcttctgatagcaattcatataaccctctaagaatacctgtttaagtcttgagtgttgaaaggaattgtttactttggaatataggaaaacagttgaatgtcagactctcatttgtatgtgatctaaatttgcaatcaatttcaataatatttacaatttgtgataaaactgacttttacagattccttttcacaacataatttaggtgtctactgttcttattgtattttgttctgctgttgatctctccagcagccgtctcatgcttctcccttgctaaaagaagtttggattactcaggcagggccatccagccccaccactagaaaagctcttcagaatcttgtccctctgttgagcccagatctcatgtgctacgaaggaaaccccaagacccagagaggaagggtcaacctggaggcaggaaaaagttggcttggatccatgtctcatcaataaccttaccatatgcttaggtcccctctatgctgtcatcagacctttggcaatggggtggtcactacctcacaaggcaaagtgttgtatgattagaaattacgtctccagtggttagctcacattgcctctcaagagacaggtttccaggtgtcttcattgtagtgggtattaattgtcttcagcctcttgatatccataccttcctgtcctctgcctagaagcaaggccagcggtgcctttacggactgatcgtgtggtgcgatttagggattcttcagttttgcttgctttaggtttccaaaagttatacattggtgttttgattggaataaagaaatcctataagctatttgggaaaaattatagtgtatgtttcccatccagaaacatgcctttctatttattagagtattatattcctgtgaaaatttttctaattttcttcacttgttttacacaattttgttattgtagttttttccattatatttttatagttgattattgcttttacatgggaaagttatttttaattatatatttgtatagtcatctcactgttgttaattttcaatagtttgttggtttagttctgttaacttttggtaaaatgacaccatctacaaagaaaaaaaaaaaaaaaaaa

SEQ ID NO: 2479 - DNA, 2041 bp, Homo sapiens
cccgtgcaggctgtggagactcccttcccgggggagggggcccccactgccgcaggtgccccctctgcctccaccccggctcctggccagaagctggagggggcttggccaaaaagagggagaaacaactcagctgttctttctagctctgaaatagaaaatgtctgcagacggcggaggcatccaggacacccaggacaaggagacacccccggaggttccagatcgtggacatcctcatcaggaaatgccttctaagctgggggaggcggtaccttcaggggacactcaggagtcactgcacattaagatggagcccgaagagccacactccgagggggcatcgcaggaggatggggctcaaggtgcctggggctgggcacccctaagtcacggctctaaggagaaagctctcttcctgcctggcggagccctcccctccccccggatccccgtgctttcccgagaggggaggaccagagaccggcagatggctgcagcgctcctcactgcctggtcccagatgccagtgactttcgaggatgtggccttgtacctctcccgggaggagtggggacggctggaccacacgcagcagaacttctacagggatgtcctgcagaagaaaaatgggctgtcactgggctttcccttcagcaggcctttctgggcccctcaagcgcacggcaagggtgaggcctcgggctccagccggcaggcaggagatgagaaggagtggagaggcgcgtgcacaggagccgtcgaggtggggcagagggtgcagacctcatccgtggcagcccttgggaatgtgaagcccttcagaaccagggcagggagagtccagtggggcgtcccgcagtgcgcgcaggaagcagcctgcggccggagctcagggccggccaaagactccgggcagccggctgagccagatcgcaccccggatgcagctccgccagaccccagtcccacggagccccaggagtaccgcgtcccggagaagcccaacgaggaggagaagggcgccccggagagtggcgaggagggcctggcccctgacagtgaggtgggcaggaagagctaccggtgcgagcagtgcggcaagggcttcagctggcactcgcacctggtgacgcaccggcgcacgcacacgggcgagaagccctacgcctgcactgactgcgggaagcgcttcggccgcagctcgcacctcatccagcaccagatcatccacacgggcgagaagccctacacctgccccgcctgccggaagagcttcagccaccactccacgctgattcagcaccagcgcatccacaccggagagaagccctacgtgtgcgaccgctgcgccaagcgcttcacccgccgctcggacttggtcacccaccagggcacccacacgggcgccaagccgcacaagtgccccatctgcgccaagtgcttcacgcagagctcggcgctagtcacccaccagcgcacccacactggggtcaagccctatccgtgccccgagtgcggcaagtgcttcagccagcgttccaacctcatcgcgcacaaccgcacacacacaggcgagaagccctaccactgcctcgactgcggcaagagcttcagccacagctcgcacctcaccgcgcaccagcgcacccaccgtggcgtgcggccctacgcctgcccgttgtgtggcaagagcttcagccggcgctccaacctgcaccggcacgagaagatccacaccaccgggcccaaggccctggccatgctgatgctgggggcggcggcggcgggggctctggccacacccccacccgctcccacctaggaggccaggaaagggggagcggggcgcccagggccactggaacagccccactggagtcaaggctccgagggaggagagaggggctcgggaagggagctggggcggtgagggcatggggtgaggcatggcgatgggggagggcgagggcgagaaagggcaggcactctgcgaattaaaggccttggacttgaaaaaaaaaaaaaaaaaaaaaaaaaa

SEQ ID NO: 2480 - DNA, 835 bp, Homo sapiens
aggaagacgacgtagcagccatcttttccctggctttggtgattcagccctgacttctcaaaaagcactgcacagaggaggaggcagcagaaccccatttcagcttcttaggactctgcacttccccagaaggaagaattaaaaatgaatatgttcaaggaagcagtgaccttcaaggacgtggctgtggccttcacggaggaggaattggggctgctgggccctgcccagaggaagctgtaccgagatgtgatggtggagaactttaggaacctgctgtcagtggggcatccacccttcaaacaagatgtatcacctatagaaagaaatgagcagctttggataatgacgacagcaacccgaagacagggaaatttagataccttacttgtaaaagctcttttgctctatgacctggctcaaacttaaacttggatttgaagttagaagaaatgttggaagtcatttatatatgaagaaatgttggaaggactcatatatgcatacattccttgagtgactatgaatgactgccgggcagtaacttctgggctgtggttgtaaactgtgagcactacaaaatgtttttccttattgataccatattatggtaggaaagacatggaataaaaaatttagatagtatgtcagtagttgtgtttttaaatgggtttcattagtgcttagcaattgggagcttggtggaccatctcttggttttggaccatctcttggtttctgtcagtatgtaaaccagaaacttcaaatgtgtcacaaaagatgagcagaactatcccgaggttcattaaagtcttttactctgtcaaaaaaaaaa

SEQ ID NO: 2481 - DNA, 2587 bp, Homo sapiens
aggaagacgacgtagcagccatcttttccctggctttggtgattcagccctgacttctcaaaaagcactgcacagaggaggaggcagcagaaccccatttcagcttcttaggactctgcacttccccagaaggaagaattaaaaatgaatatgttcaaggaagcagtgaccttcaaggacgtggctgtggccttcacggaggaggaattggggctgctgggccctgcccagaggaagctgtaccgagatgtgatggtggagaactttaggaacctgctgtcagtggggcatccacccttcaaacaagatgtatcacctatagaaagaaatgagcagctttggataatgacgacagcaacccgaagacagggaaatttaggagagaaaaatcaaagtaagttaattactgttcaagacagagaatcagaagaagagctttcttgttggcaaatctggcaacaaattgcaaatgacttaaccaggtgtcaagactccatgatcaataattctcagtgtcacaaacaaggtgatttcccttaccaggtagggacagaactgtctattcaaatttctgaagatgagaactatatagtaaataaagcagatggtcccaataatactgggaatccagagtttcctatcttgagaacccaggattcttggaggaaaacattcctgactgagtcacagagattgaacagagatcagcaaatttccataaaaaataaattatgtcaatgtaagaagggtgttgatcccatcggttggatttcacatcatgatggtcatagagtacacaaaagtgaaaaatcttatagacccaatgattatgaaaaagacaacatgaagattttgacatttgatcacaatagcatgattcacacaggacagaaatcgtaccagtgtaatgagtgtaaaaaacccttcagtgatctctccagctttgatcttcatcagcagttacaatcaggagagaagtctcttacatgtgttgagcgtggaaaaggcttctgttacagcccagttcttcctgttcatcagaaagtacatgtgggagaaaaacttaagtgtgatgagtgtggtaaggaattcagtcagggcgctcatctacagacccatcagaaagtccacgtgatagagaaaccatacaaatgtaagcaatgtgggaaaggtttcagtcgtagatcagcacttaatgttcattgcaaggtccacacggcagagaaaccttataattgtgaggagtgtgggagggccttcagtcaggcctctcatcttcaggaccatcagagactccacactggggagaagccattcaaatgtgatgcatgtggtaagagcttcagtcggaattcacatcttcaatcccatcaaagagttcatacaggagagaaaccatacaaatgtgaggagtgtggtaagggcttcatttgtagctcaaatctttacattcatcagagagtccacacaggagaaaaaccctataaatgtgaggaatgtggtaaaggctttagtcggccttcaagtcttcaggcccatcagggagttcacactggagagaagtcatacatatgtactgtatgtgggaaaggctttactctgagttcaaatcttcaagcccatcagagagtccacactggagagaagccatacaaatgcaatgagtgtgggaagagcttcaggaggaattcccattatcaagttcatctagtggtccacacaggagagaaaccctataaatgtgagatatgtgggaagggcttcagtcaaagttcgtatcttcaaatccatcagaaggcccacagtatagagaaaccttttaagtgtgaggagtgtgggcagggtttcaatcagagctcacgacttcagattcaccagctgatccatacgggtgagaaaccatacaaatgtgaagagtgtggcaagggatttagtcgtagagcagatcttaaaattcactgtaggatccacacaggagagaaaccatataattgtgaggagtgtgggaaggtcttcaggcaggcctcaaatcttttggcccatcagagagtccacagtggagaaaaaccattcaaatgtgaagaatgtgggaagagtttcggtcggagtgcacatcttcaagcccatcaaaaagtccacactggagataagccatacaaatgtgatgagtgtgggaagggcttcaagtggagcttgaaccttgacatgcatcagagggtgcacacaggagaaaaaccatataaatgtggggagtgtggtaagtacttcagtcaggcctcaagtcttcaacttcatcagagtgtccacacaggagagaaaccatacaaatgtgatgtgtgtggtaaagtcttcagtcggtcttcacaactacagtctcatcagcgagttcacactggggagaaaccttataaatgtgagatatgtggtaagagcttcagttggcgatcaaatcttacagttcatcacagaatccatgttggtgataaatcctataaaagtaataggggtggtaagaacatcagagaatccacacaggaaaaaaaatctataaaatgattctttgtgaaaaaaaaaaaaaaaaaaaaaa

SEQ ID NO: 2482 - DNA, 2406 bp, Homo sapiens
ctagtcccgattatggttattacagtttgatgaaatgtggctgagatcattggcactgtggagattaagaaatgtgaggtcagagtgttgggtaaattgttcctgcgagtgttaaggttgtcaggataatggtgggaatggggtgaagatgacaactcagcaatgacacaagaagagagtgacacagaaagattcagtagctgagaacttgagcgtagatatgttgtgggcaggagggaaatgatttggatggaagtagccaagtaagtgagaaaggaaagactttccaacaaaacttggcttagctcactcagatccctgagctgcaaacttcttctatacctttcttaccttttccagtgctgctgacttcaccccacttgcagggcatttgtgcagatggttgtttgttgaggaggaatgtgcttaatgttttaggaaccagttacattcaaggatgcctctgtggccttcaccgaggaggagtgaggtcacctggactctgctcccaggaagctgtgcggagctgtgatgctgggcaactacagaaacttggtcttggagacttgaatgaaaattctgtggagaatcttcagcagaaaacacttcaggatctgttacatgagctttcctcctggctagttttggaaggcatggccagtacaattactggaagtcaggattgtattgtgaatcatcgaggggaagtggatggggagcctgaactagatatttccccttgtcaacagtggggagaagcatcttctcctatttccagaaacagggacagtgtgatgactcttcaaagtggttgtttcgaaaacattgaaagtgaaacatatttgcctttgaaagtctcaagccaaatagacacacaagactcttcagtgaagttctgtaagaatgagcctcaggatcatcaggaaagcagacgtctctttgtaatggaagaaagcactgagagaaaagtgataaagggggaaagttgttcagagaaccttcaagttaaactggtgtctgatggacaagaactggcctcgccattgttaaatggtgaggcaacttgccagaatggccagttaaaagaatctttggatcccattgactgtaactgcaaagacattcatggatggaaatcacaggtggtcagttgtagtcagcagagagctcatacagaggagaaaccctgtgaccataataactgtgggaaaatacttaacaccagcccagatggtcatccatatgagaaaatccacactgcagagaaacaatacgaatgtagtcagtgtggtaagaacttcagtcaaagctcagagctactacttcatcagagagaccacacagaagaaaaaccctacaaatgtgagcaatgtgggaagggcttcacaaggagctcgagtctgcttatccatcaggcagtccacacagatgagaagccttataagtgtgacaagtgtgggaagggcttcaccaggagctcaagtctgctcatccatcatgccgtccatacaggcgaaaaaccttataaatgtgacaagtgtgggaagggctttagtcagagctccaaactgcacatccaccagcgagtccacactggagagaagccctatgagtgtgaggagtgtggtatgagcttcagtcagcgctcaaacctgcacatccaccagcgagtacacacaggagagaggccctacaagtgtggtgagtgtgggaagggcttcagtcagagctcgaaccttcacattcaccggtgcatccacacaggagagaagccttaccaatgctatgagtgtgggaagggtttcagccagagctcggatcttcgcatccatctcagagtccacactggagagaagccctatcactgtggcaagtgtgggaagggatttagccagagttccaaactcctcatccaccagagagtacatactggagagaagccctatgagtgcagcaagtgtgggaagggcttcagccagagctccaaccttcacatccaccagcgggttcacaagaaagatcctcgctaactgacattagcccattcaggtcttcacagcgctcatactgtaaaaactgttaaatatttagtatcactcttactttatattctacaaaggagagagatgtaagggttatttagatatgttccctcactgaaaaatcactcattcaaaatatttaagtatcaagcactttgttatgctgtacaatgaatggattgttcttgtttctcagatgggtagagtaaaagtgtctgtactttacaattcaactacatgttctacccagcattttaacggcaagaactttatatttattctcaagcagggcatgtttccctttgttcacattctctgagaaattgaaactctggtttctcttcaaaaaaaaaaaaaaaaaaaa

SEQ ID NO: 2483 - DNA, 1817 bp, Homo sapiens
ggcacgagctgaattgcgcgtggtggccatggcggccagcggggctgtggaaccagggcccccgggggctgccgtcgccccgtcgcccgccccggccccgccgcctgcccctgatcacctgttccggcccatcagcgccgaggacgaggagcagcagcccaccgagatcgagtcgctatgcatgaactgttactgcaatggcatgacgcgcctcctgctcaccaagattcccttcttcagagaaataatagtgagctccttttcctgcgagcactgtggctggaacaacacggagatccagtcggcaggcaggatccaggaccagggagtgcgctacactttgtctgtcagggctctggaggacatgaacagagaagtggtgaagactgactctgctgccacaaggattcctgagctagattttgaaattcctgcctttagccagaaaggagctctgaccactgttgaaggattgatcacccgtgctatctctggcctggagcaggaccagcctgcacgaagggcaaacaaagatgctacagctgaaagaattgatgagttcattgtcaaactgaaggagctaaagcaagtagcctcccctttcactctgatcattgatgatccctcagggaacagttttgtggaaaacccacatgctcctcagaaagatgatgccctggtgatcacacactacaaccggacccgacagcaggaagagatgctggggcttcaagaagaagcaccagcagagaagccagaagaggaagatctcagaaatgaagtgctccagttcagcacaaactgcccagaatgcaatgcccccgctcagaccaacatgaagctagtacaaatccctcactttaaggaggttatcatcatggctaccaactgcgagaactgtgggcatcggaccaatgaggtgaaatctggaggagcagtagaacccttgggcaccaggatcaccctccacatcacagatgcctcagatatgaccagagacctcctcaagtctgagacttgcagtgtggaaatcccagagctagaatttgaactgggaatggcagtcctcgggggcaagttcaccacactggaagggctgctgaaagacatccgggaactggtgaccaaaaatcctttcacactgggcgacagttccaatcctggacagacggagagactacaggagtttagccagaagatggaccagatcatcgaaggtaacatgaaggcccactttattatggatgatccagcaggaaacagttacttgcagaatgtgtatgcgcctgaagatgatcctgagatgaaggtggagcgttacaagcgcacctttgaccaaaatgaggagctagggctcaatgacatgaagacagagggctatgaggcaggcctggctccgcaacggtagcagtgggtggctcaagggccagcctccagcgctgctctttctgtaggttatttattagtattggatgaaggcgaaggctgggagtgtctttcccaccagcccttgcccatggtggggaggacatctggtttgagtcagagatctgtgcacactttttaaacagcttgtgatgcaagtgtgagcctattgtgttacttgaccttattttggaagttttgaattggcctaggaggaaacccagaaatgaaccaggggtatgtcatcacttttttcatatcaagtcctcaccctccttccacataatgctttatcctttaaggttggaactttgaagttggagaaggtggaataaagttacacctggaaaaaaaaaaaaaaaaaaaaaaaaaaaaaaaaaaaaaaaaaaaaa

SEQ ID NO: 2484 - DNA, 3303 bp, Homo sapiens
gcctaacttgcgcgctgagatttccggcgtgggagcagaggtctgagtcttgcgtgggtcctctatagggtgagaagcgtggcgctcggttcctgcctcggggaagtcctggcgcagatgggccacggggccggcgtggcggcgcctgggaccgactgaggcctaggcgccggagccggccgcgcctgggctggagcggggctcctcggcctggactgggagcccccggccccgggctcctgctggcgccgtccaaccttacatgggttcagggcgccttcgtaggcgggcacggctggtttcgggctaaggcgctctggagacctgacgatggcgtcgggcccgggctcccaggaacgggaagggctcctgatagtgaagctggaggaggactgcgcctggagccaggagctgcccccacctgacccaggaccgagccccgaggcctcccacttgcgcttcagacggttccgcttccaagaggcagctggtccccgggaagccctcagccggctccaagagctttgccatgggtggcttcggcctgagatgcgcacgaaggagcagatcttggagctgctggtgttagagcagttcctgaccatcctgccccaggagatccagagcagggtgcaggagctgcatccggagagcggcgaagaagcggtgacccttgtggaggatatgcagagagagcttgggagactgagacaacaggtcacaaaccatgggcggggaacagaagtgcttttggaggagcctttgcctctggaaacagcacgagagtcaccgagcttcaagctggagccaatggagactgagcgaagccctggccccaggctgcaggagctgctaggccccagcccccaaagggacccccaggctgtaaaggagagggcattatctgctccctggctttctctttttcctcctgaagggaacatggaagacaaggagatgactgggccccagttgcctgagagcttagaggacgtggcaatgtacatctcccaggaggagtgggggcatcaggatcctagtaagagggccctctccagggacacggtgcaggagagttatgagaatgtggactcactggagtctcacattcccagtcaggaggtcccaggcacccaggtgggacaaggaggaaagctatgggatcccagtgtccagagctgcaaggagggcctgagccccagaggcccagctccaggagaagagaaatttgagaacctggaaggtgttccgtctgtatgctctgagaacatccaccctcaggtgctgcttcctgaccaggcccgaggggaggtgccctggagtcctgagctgggaagacctcatgaccggtcgcaaggggattgggcgcctcccccagagggtggaatggagcaggccttggcaggagcctcaagtggcagagaactggggcgaccgaaggaactgcagccaaagaaactccatttatgtcccttgtgtggcaaaaatttctctaacaactcaaacctaattaggcaccagagaatacatgcagctgaaagactgtgtatgggtgtggactgcactgaaatctttggtgggaacccacgtttcctgtcactacacagagcacacctgggagaggaggcccacaagtgccttgaatgtgggaaatgcttcagtcagaacacccatctgactcgccaccaacgcacccacacgggtgagaagccctatcagtgcaacatttgcggaaaatgtttctcctgcaactccaacctccacaggcaccagagaacgcacactggggagaagccctacaagtgccctgagtgtggggagatctttgctcacagttccaacctccttcggcaccagagaattcacactggagagcgaccttataagtgtcccgagtgtgggaaaagtttctctcggagttcacacctcgtcattcacgaaagaactcatgagagagagagactttaccccttctctgagtgtggggaagctgtgagtgacagcaccccctttcttacaaaccatggagcccataaggcagagaagaagctctttgaatgtttgacttgtgggaaaagcttccggcagggcatgcacctcaccagacatcagagaacacacacaggagagaaaccgtataaatgtaccctttgtggggaaaacttctctcatagatccaatttaatcaggcaccagagaatccacacaggagaaaaaccctatacctgtcatgagtgcggagacagcttctctcacagctccaatcggattcgccacctgagaacgcatacgggagagagaccctataaatgttctgaatgtggagaaagcttctctcggagttcccgtcttatgagtcatcagagaactcacacaggttagtaacagtggggtttctctttgccccaggtgaggtggcatattcagaggagcctgttggcaagagctggtattccctgcccagccgaccaaatgacctctgcattcttcaggtaatgggggctcattgtgagggaggtgcagaggcagcagaggattggcataaaactgaaaaggagttctgtctgcatgagaaaggatggcaagtctctgaggtgacctcagggtggaattctctgttaagtccaccctgccccagggtgctcctaccctcttggtctttttaaagccaaggtgcgatttgggcacctgactgtccagtttaccttaacaagtttgggaatccatgtgatgtttttgatacttcttcctcatttgggacattcagtaggagcatttgggcttccggggcccctgagaccaaagaagaggggccaagtaccctgggaaatcagctgaaggtcaacaaaagactggttgtgagttgcagctgtcccgaaggccccagttgggaagccatgggcagtccagatcaagccaccacgtgccctacgatggcctaacaggagtgcccattggcagattacacatgtaaatatgacctcagacaaaaaggaaccagaggcccaagggcaataataaggtggaatttgcaggtcagcccaggaattggcagaggaagtaggtgtctgataaccctttgtggagaatgagattccccccacctgtgtgagaaaaataaacagctctggagtcttgttcctgactccagaggaacgagagcattccaggaaagagagattccctggaaaattgaaaatgtgaatcctagggggaaattggggattgtgtctttccctgttgaaaatgtttggatgggaataaatatcttcaggaaacataaaaaaaaaaaaaaaaaaaaaa

SEQ ID NO: 2485 - DNA, 2538 bp, Homo sapiens
cgcccccaccgccacccaaccaagcatcacccattccagcacttccggcctgacccctgtccagcgcctttcctttctccagcttctgctctgccccaagagtggtcgccttcgtggcagggcacgactctctcccagctcgggtcgccgcccacattagtgtggggccctgcggcctagcgtccctcaccagaggcctccccttgcctagctggaccgccgagggacatcgacgagtatcctcctcctgctgtccccggcttcgcctgccgcccctaaccggccagtcaagatggccgccgctgggtgaggcaagctggcgcgccgcgggggcgtctgggagttgtagttcgggacggcgggctgacgcacttcgccgccggccgacgggcgccattgtgcggcgcgcgccggagtatcctgagctccagctggaccctaaattggatcctcttcctgctgagagtcccctaatgaacattgaggttgttgaggtcctcacactgaaccaggaggtggctggtccccggaatgcccagatccaggccctatatgctgaagatggaagcctgagtgcagatgcccccagtgagcaggtccaacagcagggcaagcatccaggtgaccctgaggccgcgcgccagaggttccggcagttccgttataaggacatgacaggtccccgggaggccctggaccagctccgagagctgtgtcaccagtggctacagcctaaggcacgctccaaggagcagatcctggagctgctggtgctggagcagttcctaggtgcactgcctgtgaagctccggacatgggtggaatcgcagcacccagagaactgccaagaggtggtggccctggtagagggtgtgacctggatgtctgaggaggaagtacttcctgcaggacaacctgccgagggcaccacctgctgcctcgaggtcactgcccagcaggaggagaagcaggaggatgcagccatctgcccagtgacagtgctccctgaggagccagtgaccttccaggatgtggctgtggacttcagccgggaggagtgggggctgctgggcccgacacagaggaccgagtaccgcgatgtgatgctggagacctttgggcacctggtctctgtggggtgggagactacactggaaaataaagagttagctccaaattctgacattcctgaggaagaaccagcccccagcctgaaagtacaagaatcctcaagggattgtgccttgtcctctacattagaagataccttgcagggtggggtccaggaagtccaagacacagtgttgaagcagatggagtctgctcaggaaaaagaccttcctcagaagaagcactttgacaaccgtgagtcccaggcaaacagtggtgctcttgacacaaaccaagtttcgctccagaaaattgacaaccctgagtcccaggcaaacagtggcgctcttgacacaaaccaagttttgctccacaaaattcctcctagaaaacgattgcgcaaacgtgactcacaagttaaaagtatgaaacataattcacgtgtaaaaattcatcagaagagctgtgaaaggcaaaaggccaaggaaggcaatggttgtaggaaaaccttcagtcggagtactaaacagattacgtttataagaattcacaaggggagccaagtttgccgatgcagtgaatgtggtaaaatattccggaacccaagatacttttctgtgcataagaaaatccataccggagagaggccctatgtgtgtcaagactgtgggaaaggatttgttcagagctcttccctcacacagcatcagagagttcattctggagagagaccatttgaatgtcaggagtgtgggaggaccttcaatgatcgctcagccatctcccagcacctgaggactcacactggcgctaagccctacaagtgtcaggactgtggaaaagccttccgccagagctcccacctcatcagacatcagaggactcacaccggggagcgcccatatgcatgcaacaaatgtggaaaggccttcacccagagctcacaccttattgggcaccagagaacccacaataggacaaagcgaaagaagaaacagcctacctcatagctctcaagccagttgaagaaaccttgccttttcagcttgaccctgcaatataacatgcacaggcctgcttgtgaatcaggactgaatgtgaaagggaagtattgagtgaggacattcccaaaaccaaaggacaactgaggagactgcccagcacataatgaataaataagaaaatgagtgaggagttattaacatcatttggaaaaaagatttcccattcacttgatattgtttgttcactcatttagtcattaaaagtgagattaataaaatctgaaaatgttatataataactttaaaaagccaggtaattaataatctgcactgatattacatccacagtaccacagtatttatgtgtatgaattaaggattaaaagataatgtggataaataaactattgatctatgtctgtgt

SEQ ID NO: 2486 - DNA, 2647 bp, Homo sapiens
ggggcccaggttgctgctctggccgccgagtgaggggcggggggggcccgggggcgcgcggcccgagacccccccggccgccctcctcctttctttgttcctgtggctgggggggtatcccctccctccacaacatggagccatctcctctgtctcccagtggggcagcacttcccctgccgctgtcgctggctccgcccccactacccctgccagcagctgcagtggtacatgtgtccttccctgaggtgaccagtgccctcttggagtccctcaatcagcagcgtctgcagggccagctctgcgatgtatctatcagagtgcagggccgggagttccgggctcatcgggctgtcctggctgcctcctccccttacttccatgatcaggtcctactcaaaggcatgacctccatctcgctgcccagtgtcatggacccaggcgcctttgagactgtcctagcctccgcttacactggccgcctcagcatggctgctgctgacattgtcaacttccttacagtggggtctgtgctccaaatgtggcacattgtggacaagtgcactgaactactccgagaaggccgggcctcagctaccaccaccatcactactgctgcagccacctctgtcactgtccctggtgctggggtgccatccgggagtgggggcactgtggcccctgctaccatgggctctgcgcgctcccatgcctccagccgggccagtgagaatcaatctcccagcagcagcaactacttcagccccagggagtccactgatttctcatcttcctcccaagaggcatttgcagcttctgcagtgggcagtggggagcgtcgaggaggtggccctgtattcccagcccctgtcgttggcagtggaggggccacatctggaaagctgctgctggaggcagatgagctgtgcgatgatggtggggatgggaggggggcagtggttcctggggctgggctccggagacccacctacacaccccctagcatcatgccacagaaacactgggtatacgtgaagcgaggtggtaattgcccagcgccagcacccctggttccccaagacccagatctggaggaggaagaggaggaggaagatctggtgttgacctgtgaggatgatgaagatgaagaactagggggtagctccagggttccagtggggggagggcctgaggctaccctcagcataagtgatgtccgtaccctgagtgagcccccagacaagggggaggagcaggtcaacttctgtgagtcctccaatgactttggcccatatgagggtgggggtcctgtggcaggtcttgatgactcaggggggccaactccctcttcctatgccccctcccaccctcctcgaccgctccttcccttggacatgcagggcaaccagatcctggtcttcccgtcgtcgtcttcatcctcatcctcacaggctcctggccaaccaccagggaaccaagcagaacacggggcagtgaccgtggggggcacgtcggtggggagcctgggtgtgccgggtagcgttggtggggtccctggagggactggcagtggggacgggaataagatctttctgtgccattgtgggaaggccttctcccacaagagcatgcgggaccggcacgtgaacatgcacctcaatctgcggccgtttgactgccccgtgtgcaacaaaaagttcaagatgaagcaccatctgactgagcacatgaagacgcacacaggtctcaagccctacgagtgcggagtctgcgccaagaagttcatgtggcgagacagcttcatgcgccaccgaggacactgtgagcgccggcaccgcctgggcggggtcggggccgtacctgggcctgggactcccacggggccatccttgccgtccaagagagagtctcccggagtgggcgggggcagcggcgacgaagcgagtgcggccacgcccccgtccagcagacgtgtctggtccccacccagagtccacaaggtggagatgggcttcggtggaggtggaggagcaaactgaaggggcaggctactggggtggggtagctttcgggaaagggaataaggagcacgatgcaagggcgctgtggcccccgggtgatctcccaccacacttactgtcttcctttatctctgtggacttgtatatattctggaaggggaaccacagtttcaccatcacccgcccattctactactcaacccctcccccccaaggtatttccagaactaaacccttcctttccctctgatgggtacactgaagcccctgctccacagagtagattgcacatggagggagggagagggggcgtgttgaacatcctgcagtcacagggtcaggggtcaggtggttgtagtctgtgcctgaagtctgtgtttgtgttgtcgtggagacaaggcctttgagccccacccttgtcctagaacctaccccctctcaaggatgcgctctttatttctaccctgtctctccccgccacccccgacttcccgtggaaattcccaactcggttctcatggaggagtgggtggagacaaggagggagtaagtcgtaggagtacaaggtttttattttttttaacagtgattaaaatatttattggtcatttaaaaaaaaaaaaaaa

SEQ ID NO: 2487 - DNA, 4462 bp, Homo sapiens
cgcagcggaggaaagaggatggcgacctcgtcgatgccggagtcagagaggaacgtggctacgaaagcctcggagtgaagttcccagaccctacgccccgctgtcaggcagcccgccgatcagatggaggagaacgaggtggagagcagcagcgacgcggcccctgggcctggccggcccgaggagccctctgagagcggcctgggtgtgggcacctcagaagccgtgtccgccgacagcagcgacgccgcggccgccccggggcaggcagaggccgatgactctggcgtggggcaaagctcggaccgcggcagccgttctcaggaggaggtatctgagagcagctcgagcgcagaccccctgcctaatagctacctccctgattcatcgtctgtgtctcatgggccagtggcaggggtgacaggcggtcccccagcacttgtgcactctagtgcactcccagaccccaacatgctggtgtccgactgcacagcttcctcctcggacctgggctcggccatcgacaagatcatcgagtccaccatcgggcccgacctcatccagaactgcatcactgtgaccagtgctgaggatggcggggccgagaccacacggtacctgatcctacagggcccagatgatggagcccccatgacatcaccaatgtccagttccaccttggcccacagcctagcagccattgaggccctggcagatggccccacatccacatccacatgcctggaggcacagggtgggcccagctccccggtgcagctgcccccagcctccggtgccgaagagccggacctgcagagcctggaggccatgatggaggtggtggtggtgcagcagttcaaatgcaagatgtgccagtaccggagcagcaccaaggccacactgctgcgccacatgcgggaacgccacttccgtccagtagcagcagccgcagcagcagctggtaaaaaaggacgtctacggaagtggagcacctccaccaagagccaagaggaagagggaccagaggaggaggacgatgatgacattgtagacgctggagccattgatgacctggaggaggatagcgactataatccagctgaggatgagccccgaggccggcagcttcggctccagcgccccacccccagtaccccaaggccccgaaggagacctggccggccccggaagctgccccgcctggagatctcagacctcccagatggtgtggaaggagagcctctagtgagttcccagagtggacagagccctccagagccacaggatcccgaggctcccagctcctcaggcccaggacacctggtggccatgggcaaggtgagcaggacccctgtggaagctggtgtgagccagtcagatgcagagaacgcagccccctcctgcccggatgagcatgacactctgccccggcgccgaggtcgaccttccaggcgcttcctaggcaagaaataccgcaagtactattacaagtcgcccaaaccacttttgaggcccttcctgtgccgcatctgtggttctcgctttctgtcccacgaggacctgcgcttccacgtcaactcccatgaggctggcgatccccagctcttcaagtgcctgcagtgcagctatcgttcccgccgctggtcctcgctcaaggagcacatgttcaaccacgtgggcagcaagccctacaagtgtgacgagtgcagctacaccagtgtctaccggaaggacgtcattcggcacgccgctgtgcacagccgggaccggaagaagaggccagatccgactccaaagctgagctctttcccctgccctgtgtgtggccgtgtgtaccccatgcagaaaagactcacgcagcacatgaagacgcacagcactgagaagccccacatgtgtgacaagtgtggaaagtcctttaagaagcgctacaccttcaaaatgcacctgctcacgcacatccaggctgttgccaaccgcaggttcaagtgtgagttctgtgagtttgtttgtgaagacaagaaggcactgctgaaccaccagttgtcccacgtcagtgacaagcccttcaaatgcagcttttgtccctaccgcaccttccgagaggacttcttgctgtcccatgtggctgtcaagcacacaggggccaagcccttcgcctgtgagtactgccacttcagcacacggcacaagaagaacctgcgcctgcacgtacggtgccgacacgcaagcagcttcgaggaatgggggaggcgccaccctgaggagcccccctcccgccgtcgccccttcttctctctgcagcagattgaggagctgaagcagcagcacagtgcggcccctggaccacctcccagttccccaggacctcctgagatacccccagaggcgacaactttccagtcatctgaggctccctcattgctctgttctgacaccctgggcggcgccaccatcatctaccagcaaggagctgaggagtcgacagcgatggccacgcagacagccttggatcttctgctgaacatgagtgctcagcgggaactggggggcacagccctgcaggtggctgtggtgaagtcggaagatgtggaagcagggttagcatcccctggtgggcagccctcccctgaaggtgccactccacaggtggtcaccctccacgtggcagagccagggggcggtgcagcagccgagagccagctaggccctcctgacctaccgcagatcaccctggcacctggtccatttggtgggactggctacagtgtcatcacagcaccccctatggaggagggaacatcagctcctggcacaccttacagcgaggagcccgcaggagaggcagcccaggctgtggttgtgagtgacaccctaaaagaagctggcacccactacatcatggctactgatggtacccagttgcaccacattgagctcaccgcagatggctccatctccttcccaagtccagatgctctggcctctggtgccaaatggcccctgctgcagtgtgggggactgcccagagacggccctgagcccccatctccagccaagacccactgcgtaggggactcccagagctctgcctcctcacctcctgcaaccagcaaagccctgggcctggcagtgcccccgtcaccgccatctgcagccactgctgcatcaaagaagttttcctgcaagatctgtgccgaggccttccctggccgagctgagatggagagtcacaagcgggcccacgctgggcctggtgccttcaagtgccccgactgccccttcagtgcccgccagtggcccgaggtccgggcgcacatggcacagcactcaagcctacggccccaccagtgtagccagtgcagctttgcctccaagaacaagaaggacctgcgtcggcacatgctgactcacacaaaggagaagccttttgcatgccacctctgcgggcagcgtttcaaccgtaacgggcacctcaagttccacatccagcggctgcacagtcctgatgggaggaagtcaggaacccctacagcccgggcccctacccagaccccaacccagaccatcatcctgaacagtgatgacgaaacactggccaccctgcacactgcactccagtccagtcacggggtcctgggcccagagcggctacagcaggcactgagccaggaacacatcatcgttgcccaggaacagacagtgaccaatcaggaggaagccgcctacatccaagagatcaccacggcagatggccagaccgtacagcacctggtgacctccgacaaccaggtgcagtatatcatctcccaggatggtgtccagcacctgctcccccaggaatatgttgtggtccctgaaggccatcacatccaggtacaggagggccagatcacacacatccagtatgaacaaggagccccgttccttcaggagtcccagatccagtatgtgcctgtgtccccaggccagcagcttgtcacacaggctcaacttgaggctgcagcacactcagctgtcacagcagtggctgatgctgccatggcccaagcccagggcctgtttggtacagacgagacagtgcccgaacacattcaacagctgcagcaccagggcatcgagtacgacgtcatcaccctggccgatgactgagccccgagggcccaacacagatcatggatttgcggccagctctcctgggggtagggggccaccaggactcacctccctcttcatttaggatctccagatactggatagccagcatcctctcattcccagggagccagacctgtgctgttggggttaggggcagccatgggccccagccaggacatgctgggtgccccagcctgcaggcaggctttgggagagaaatttatttttgtttgggtggacccactggcctgtcagtctcaataaagggaccggagtccagtcctgaacagcttaaaaaaaaaaa

SEQ ID NO: 2488 - DNA, 6130 bp, Homo sapiens
tgcctcgtccgccggctacgtctgcgtttccgcctttccttttgtttttctcaggttttgcgtgggaggcggtcccgggatttcaagggtctacgcgcttttctatggcgaatgcaacccgacgagggagtgggctgtatcttcagagttgtctccgtctttccaagaacagaacaaaatgaacaaggtagaacagaagtcccaggagtcagtatcatttaaagatgtgactgtgggcttcacccaggaggagtggcagcacctggaccctagtcagagggctctgtatagagatgtgatgctggagaactacagcaaccttgtctcagtggggtattgtgttcacaaaccagaggtgatcttcaggctgcaacaaggagaagagccatggaaacaggaggaagaattcccaagccaaagctttccagaagtctggacagctgatcacctgaaagagaggagccaagaaaaccaatctaaacatttgtgggaagttgtattcatcaataatgaaatgctgactaaggaacaaggtgatgtaataggaataccatttaatgtggatgtaagttcttttccttccagaaaaatgttctgtcagtgtgattcatgtggaatgagtttcaacactgtttcagaattggttatcagtaagataaactatttaggaaaaaagtctgatgaatttaatgcctgtgggaaattgttactcaatattaagcatgatgaaactcatactcaagagaaaaatgaagttttgaaaaataggaacacactgagtcatcatgaggagactttgcagcatgagaagattcaaactttagagcacaattttgaatacagtatatgtcaggaaaccctccttgaaaaggcagtattcaatacacagaagagagagaacgcagaagagaataactgtgattataatgaatttgggagaactttgtgtgatagttcatccctcttgttccatcagatatctccgtcaagggacaatcactatgaatttagtgattgtgagaagttcttatgtgtgaagtccaccctttctaaacctcatggggtatctatgaaacactatgattgtggtgaaagtgggaataatttcaggaggaaattgtgtctgtcacaccttcagaaaggtgataaaggagagaaacactttgaatgtaatgaatgtgggaaagctttctgggagaagtcacatctcactcgacatcagagggtgcacacaggacagaaaccctttcaatgtaatgaatgtgaaaaagctttctgggataagtcaaacctcactaaacatcaaagatcacacacaggggagaaaccttttgaatgcaatgaatgtgggaaagcctttagccataagtcagccctcacattacaccagagaacacatacaggggagaaaccctatcaatgtaatgcgtgtgggaaaactttttgccagaaatctgacctcactaaacatcagagaacacacacagggctgaaaccctatgaatgttatgaatgtggaaaatccttccgtgtgacttcgcaccttaaagtacaccagagaactcacacaggtgagaaaccttttgaatgtcttgagtgtgggaaatcctttagtgaaaagtcaaatcttacacagcatcagagaattcacataggagataaatcttatgaatgtaatgcatgtgggaaaactttctaccacaagtcattactcaccaggcatcagataattcatacagggtggaaaccttatgaatgttatgaatgtgggaaaaccttctgcttgaagtcagacctcacagtacatcagagaacacacacagggcagaaaccctttgcatgtcccgaatgtgggaaattctttagccataagtcaaccctctctcaacattatagaacacacacaggggagaaaccctacgaatgtcatgaatgtggaaaaatcttttacaataaatcatacctaactaaacataatagaacacatacaggggagaaaccctatgaatgtaatgaatgtggaaaagccttctaccagaagtcacaactcactcagcatcagagaattcacataggggagaaaccctataaatgtaatgagtgtggaaaagctttctgccataagtcagctctaattgtacatcagagaacccatacacaagaaaagccctataaatgtaatgaatgtggaaaatctttctgtgtaaaatcaggacttattttccatgagagaaagcacacgggggagaaaccctatgaatgcaatgaatgtgggaaattcttcaggcacaaatcatcactcacagtacatcacagggctcacacaggagagaaatcttgtcaatgtaatgaatgtggaaaaatcttttaccgtaaatcggaacttgctcaacatcagagatcacatacaggggaaaagccctatgaatgtaacacatgcaggaaaactttctctcaaaagtcaaatctcattgtacatcagagaagacatataggagaaaaccttatgaatgaaatggatattagaaatttccagccacaagtcagcctccataatgcctcagagtattcacactgtggagaaagccctgatgacatcctgaatgttcagtaactatccacaaactcaccttatgttactccaaagtaatagtaggggataaacccatagactacaacaattataggacagcttttgttaggaagtgatattctatgtaatatcagatggttaatacgggcataacaccttacagattttttttgaatttgtgaaagtttttggcaaaaatgcaaataaggttatgttagaatttacactgaggagaaaattgtcaatttaagaaatctaaagtgaaaattttgcttagaaataaaatacgacaagttatgttttgagtttgatgccataatagtttttagggcacctaacaataatttatagatgtatattgtggaatgtaaagctttaagaacttaaacaaaggtaataattaaaataacctcacaagaagtttaatgagtagagagaattcccatgtacacttcaccaaacttcctctaaggataatgtataatcatagtatatggtcaagtccaagaaatcgatgttaccttgctggtagatagagacttagtcagattttactatggtttgcatgcactctgtgtgtgtgtgtacgtgtatgtgtgtgtgtgtggttatatcaaacttttacgacttttacatttgagtaaccatcaacacgattagtttacagaactgaaaaggaatctgagatctgtactgtatcaggattacaaaggatttagcctcaagtagttccctttttgtattaataaccacacgctttctgcaaccctatcccttgcatccacttgactatgaagtttttttaaagcacagataaattgaataatcagggcaatagcattaagcacatctgcgaattatccctgaagttcaaaagacttatatatgtataagtggtatgtgatataaatcgtgtgtttcatatgcataatggaatttaacgtaattgtgaataggaagtaggtatcctagtttagtagtggttacattatcaggcccatcccagatgtttgtgatgtcctgaaacaatttaaaaggagacccacagagctaatgtttatccatttaaaaggtataaatcaaaataacaaattatctaaaaaaaatctatcctgtacatgtgaagatctaggctcgcctccatgttactccctttctcttcctacctgtggctcatgccatgccatgaagtgcctagggtacatatgtgaacattccagccttcagcataagtggtagtccaaattttctttaagcagctgctctccaagacagggccctggaaaggcccacacatacagcccagggctgcccagggctgttggactgtcatttcaaggctcattgtccccagacagggatctgggccctcagacttttgagaatatgaagaggagggttgaggctggagcagaaccagaatcaagctggtgtggggcttttattgatagtgtgaagattgtacactatattacatgatcagatcatacaaataatctaagattatacagtctagtgatcctagattacacaagtaatctaagcttccactttaggaaactagaaaaagaagagcaaattaaatccaaagtaacctgaaaaaacattagagtaaaaatcattgaaattgaaaagagaaaatcgataaaacccaaaactggttccttgaaaaggtcagtaaaattgataaacctctagctagcttaagaacaaacagaagacaaatattgctaataccaaaaatgaaagaggccatcacagctaatcctatggtcaccaaaaggattagaaagaaacatggacaactctgtccataaatttgataacttagctaaaatggaccaattccttgcaagacgcattctctcaaagctcacacaagatagacctcaataggcatatgtatctattaaataaaccaaagcagtaattaataaccttccaaggccaggtacagtggttcatgcctgtaatcccagcacttcactttgggaggctgaggcgggtggatcacaaggtcaggagttcgagaccagcctggtcaacatggtgaaaccccctatctactaaaaatacaaaaaattagctgggcatggtggcatgcgtgtgtagtcgaagctactcaggaggctgaggcagaagaatcacttgaacctgggaggtggatgttgcagtgagctgagattgtgccactgtactgcagcctgggtgacagaatgagactgcatctcaaaaaataataatgaaactttccaaaacaaagtgccaggaccagctgggttcactgatgtgtttttgagatacttaaggtagaaatgataccaagtctctaccatctctttcagaaaataaaagcagagataacacttcccaactcattttgtgaggccagtattaccctaatagcaaaaccaggcaaagatattacaagaaaggaaaactacagatcaatatttccattgaacacagatgcagaaatcctcaaaatattagcaaatcaggaatgcaaggcttgttcaacatttgatattcagtgtaatccattgcatgcattagcagctcaaagatgaaatacgatcatatcaataggtacagaaaaagcatttgacaaaatccaatatccattcatgttaaaacctctcaacacagaaggaatacaggagaacttactcaagttggtaaagaacatactacaaaaaaccctacagctaacattatccttgatgtttccaactagacactttcctactaagatcaggaacatggcaaggaacaccacaccactgcttttcagcattgtactggaagtgctatataatgcagtgttaaaaaaaaaagaaataaaatgcacatagatttgaaaggatgaaatacaactttgttcacaagtaacatgattgtctttgtagagaattctaaataacaaaaaccctgctgacattaataagcaattacagcaggattgcaggatacagtcctcaggtagatgataaaaaggaattggacatcaagtcattaaaagacacggagaaaccctaaatgcttattgttaagtgaaaaccaatctgaaaaggctttctattttgtatgattgcaattatatgacattttgggagaggcaaaactattgagccagtgaaaggaccagtggttgctgagagttgaggggaaaggagggatggcaggtagagaggtgatttttaaggcagtgaaagtactctctagggtactgtaatttgtcaaaacgcagagaatggaaaacagtgaacggaaaacacagagtaaaccctaatgtcaactctggacttcagttaataataatgtatcactgttggctcattaattgtaacaaatgaaccataatgatgcaagatgttaatgattggggagcctgtggaagatgggaggggaaagggttatatgagaattctctatactttttgctcaactttctgtaaccctaaagctactctaaaaaatgaagtgtatcaagtaaataaataaccaaccaaccaaccctgaggaacaaaaaaaaaa

SEQ ID NO: 2489 - DNA, 6127 bp, Homo sapiens
tgcctcgtccgccggctacgtctgcgtttccgcctttccttttgtttttctcaggttttgcgtgggaggcggtcccgggatttcaagggtctacgcgcttttctatggcgaatgcaacccgacgagggagtgggctgtatcttcagagttgtctccgtctttccaagaacagaacaaaatgaacaaggtagaacagaagtcccaggagtcagtatcatttaaagatgtgactgtgggcttcacccaggaggagtggcagcacctggaccctagtcagagggctctgtatagagatgtgatgctggagaactacagcaaccttgtctcagtggggtattgtgttcacaaaccagaggtgatcttcaggctgcaacaaggagaagagccatggaaacaggaggaagaattcccaagccaaagctttccagtctggacagctgatcacctgaaagagaggagccaagaaaaccaatctaaacatttgtgggaagttgtattcatcaataatgaaatgctgactaaggaacaaggtgatgtaataggaataccatttaatgtggatgtaagttcttttccttccagaaaaatgttctgtcagtgtgattcatgtggaatgagtttcaacactgtttcagaattggttatcagtaagataaactatttaggaaaaaagtctgatgaatttaatgcctgtgggaaattgttactcaatattaagcatgatgaaactcatactcaagagaaaaatgaagttttgaaaaataggaacacactgagtcatcatgaggagactttgcagcatgagaagattcaaactttagagcacaattttgaatacagtatatgtcaggaaaccctccttgaaaaggcagtattcaatacacagaagagagagaacgcagaagagaataactgtgattataatgaatttgggagaactttgtgtgatagttcatccctcttgttccatcagatatctccgtcaagggacaatcactatgaatttagtgattgtgagaagttcttatgtgtgaagtccaccctttctaaacctcatggggtatctatgaaacactatgattgtggtgaaagtgggaataatttcaggaggaaattgtgtctgtcacaccttcagaaaggtgataaaggagagaaacactttgaatgtaatgaatgtgggaaagctttctgggagaagtcacatctcactcgacatcagagggtgcacacaggacagaaaccctttcaatgtaatgaatgtgaaaaagctttctgggataagtcaaacctcactaaacatcaaagatcacacacaggggagaaaccttttgaatgcaatgaatgtgggaaagcctttagccataagtcagccctcacattacaccagagaacacatacaggggagaaaccctatcaatgtaatgcgtgtgggaaaactttttgccagaaatctgacctcactaaacatcagagaacacacacagggctgaaaccctatgaatgttatgaatgtggaaaatccttccgtgtgacttcgcaccttaaagtacaccagagaactcacacaggtgagaaaccttttgaatgtcttgagtgtgggaaatcctttagtgaaaagtcaaatcttacacagcatcagagaattcacataggagataaatcttatgaatgtaatgcatgtgggaaaactttctaccacaagtcattactcaccaggcatcagataattcatacagggtggaaaccttatgaatgttatgaatgtgggaaaaccttctgcttgaagtcagacctcacagtacatcagagaacacacacagggcagaaaccctttgcatgtcccgaatgtgggaaattctttagccataagtcaaccctctctcaacattatagaacacacacaggggagaaaccctacgaatgtcatgaatgtggaaaaatcttttacaataaatcatacctaactaaacataatagaacacatacaggggagaaaccctatgaatgtaatgaatgtggaaaagccttctaccagaagtcacaactcactcagcatcagagaattcacataggggagaaaccctataaatgtaatgagtgtggaaaagctttctgccataagtcagctctaattgtacatcagagaacccatacacaagaaaagccctataaatgtaatgaatgtggaaaatctttctgtgtaaaatcaggacttattttccatgagagaaagcacacgggggagaaaccctatgaatgcaatgaatgtgggaaattcttcaggcacaaatcatcactcacagtacatcacagggctcacacaggagagaaatcttgtcaatgtaatgaatgtggaaaaatcttttaccgtaaatcggaacttgctcaacatcagagatcacatacaggggaaaagccctatgaatgtaacacatgcaggaaaactttctctcaaaagtcaaatctcattgtacatcagagaagacatataggagaaaaccttatgaatgaaatggatattagaaatttccagccacaagtcagcctccataatgcctcagagtattcacactgtggagaaagccctgatgacatcctgaatgttcagtaactatccacaaactcaccttatgttactccaaagtaatagtaggggataaacccatagactacaacaattataggacagcttttgttaggaagtgatattctatgtaatatcagatggttaatacgggcataacaccttacagattttttttgaatttgtgaaagtttttggcaaaaatgcaaataaggttatgttagaatttacactgaggagaaaattgtcaatttaagaaatctaaagtgaaaattttgcttagaaataaaatacgacaagttatgttttgagtttgatgccataatagtttttagggcacctaacaataatttatagatgtatattgtggaatgtaaagctttaagaacttaaacaaaggtaataattaaaataacctcacaagaagtttaatgagtagagagaattcccatgtacacttcaccaaacttcctctaaggataatgtataatcatagtatatggtcaagtccaagaaatcgatgttaccttgctggtagatagagacttagtcagattttactatggtttgcatgcactctgtgtgtgtgtgtacgtgtatgtgtgtgtgtgtggttatatcaaacttttacgacttttacatttgagtaaccatcaacacgattagtttacagaactgaaaaggaatctgagatctgtactgtatcaggattacaaaggatttagcctcaagtagttccctttttgtattaataaccacacgctttctgcaaccctatcccttgcatccacttgactatgaagtttttttaaagcacagataaattgaataatcagggcaatagcattaagcacatctgcgaattatccctgaagttcaaaagacttatatatgtataagtggtatgtgatataaatcgtgtgtttcatatgcataatggaatttaacgtaattgtgaataggaagtaggtatcctagtttagtagtggttacattatcaggcccatcccagatgtttgtgatgtcctgaaacaatttaaaaggagacccacagagctaatgtttatccatttaaaaggtataaatcaaaataacaaattatctaaaaaaaatctatcctgtacatgtgaagatctaggctcgcctccatgttactccctttctcttcctacctgtggctcatgccatgccatgaagtgcctagggtacatatgtgaacattccagccttcagcataagtggtagtccaaattttctttaagcagctgctctccaagacagggccctggaaaggcccacacatacagcccagggctgcccagggctgttggactgtcatttcaaggctcattgtccccagacagggatctgggccctcagacttttgagaatatgaagaggagggttgaggctggagcagaaccagaatcaagctggtgtggggcttttattgatagtgtgaagattgtacactatattacatgatcagatcatacaaataatctaagattatacagtctagtgatcctagattacacaagtaatctaagcttccactttaggaaactagaaaaagaagagcaaattaaatccaaagtaacctgaaaaaacattagagtaaaaatcattgaaattgaaaagagaaaatcgataaaacccaaaactggttccttgaaaaggtcagtaaaattgataaacctctagctagcttaagaacaaacagaagacaaatattgctaataccaaaaatgaaagaggccatcacagctaatcctatggtcaccaaaaggattagaaagaaacatggacaactctgtccataaatttgataacttagctaaaatggaccaattccttgcaagacgcattctctcaaagctcacacaagatagacctcaataggcatatgtatctattaaataaaccaaagcagtaattaataaccttccaaggccaggtacagtggttcatgcctgtaatcccagcacttcactttgggaggctgaggcgggtggatcacaaggtcaggagttcgagaccagcctggtcaacatggtgaaaccccctatctactaaaaatacaaaaaattagctgggcatggtggcatgcgtgtgtagtcgaagctactcaggaggctgaggcagaagaatcacttgaacctgggaggtggatgttgcagtgagctgagattgtgccactgtactgcagcctgggtgacagaatgagactgcatctcaaaaaataataatgaaactttccaaaacaaagtgccaggaccagctgggttcactgatgtgtttttgagatacttaaggtagaaatgataccaagtctctaccatctctttcagaaaataaaagcagagataacacttcccaactcattttgtgaggccagtattaccctaatagcaaaaccaggcaaagatattacaagaaaggaaaactacagatcaatatttccattgaacacagatgcagaaatcctcaaaatattagcaaatcaggaatgcaaggcttgttcaacatttgatattcagtgtaatccattgcatgcattagcagctcaaagatgaaatacgatcatatcaataggtacagaaaaagcatttgacaaaatccaatatccattcatgttaaaacctctcaacacagaaggaatacaggagaacttactcaagttggtaaagaacatactacaaaaaaccctacagctaacattatccttgatgtttccaactagacactttcctactaagatcaggaacatggcaaggaacaccacaccactgcttttcagcattgtactggaagtgctatataatgcagtgttaaaaaaaaaagaaataaaatgcacatagatttgaaaggatgaaatacaactttgttcacaagtaacatgattgtctttgtagagaattctaaataacaaaaaccctgctgacattaataagcaattacagcaggattgcaggatacagtcctcaggtagatgataaaaaggaattggacatcaagtcattaaaagacacggagaaaccctaaatgcttattgttaagtgaaaaccaatctgaaaaggctttctattttgtatgattgcaattatatgacattttgggagaggcaaaactattgagccagtgaaaggaccagtggttgctgagagttgaggggaaaggagggatggcaggtagagaggtgatttttaaggcagtgaaagtactctctagggtactgtaatttgtcaaaacgcagagaatggaaaacagtgaacggaaaacacagagtaaaccctaatgtcaactctggacttcagttaataataatgtatcactgttggctcattaattgtaacaaatgaaccataatgatgcaagatgttaatgattggggagcctgtggaagatgggaggggaaagggttatatgagaattctctatactttttgctcaactttctgtaaccctaaagctactctaaaaaatgaagtgtatcaagtaaataaataaccaaccaaccaaccctgaggaacaaaaaaaaaa

SEQ ID NO: 2490 - DNA, 2830 bp, Homo sapiens
gactcaccctgggccgggggtgaggcttggactgtttctttttccaaaagaggagctcaaaagagaaagttcatctagaaatctcaaagccatgtctcaggatgaactagagtatgcccttacagggatcagtgtcattcaaggatgtgactgtggacttcacccaggaggagtggcagcaactagaccctgctcagaaggcgctttacagggatgtgatgttggaaaactattgccacttcgtatctgtggggtttcacatggctaagcctgatatgatccgcaagttggaacaaggagaagagctatggacacagagaatttttccaagttacagctacctagaagaagatgggaaaactgaagatgtcttagtgaagttcaaagaataccaagacaggcattctagacccctcatattcatcaaccacaaaaaactaattaaggagagaagtaatatttatggtaaaacatttactctaggcaagaaccgtatttcaaaaacaatactatgtgaatataaacctgatggaaaagttttgaaaaatatttcagaactagtcattagaaatataagccccataaaagagaagtttggtgacagtactggatgggagaaatcactcctcaataccaagcatgagaaaattcatcctgcagtgaatctccataaacaaacagaaagagttctcagtggtaaacaggagcttattcagcatcagaaggttcaagctccagagcaaccatttgaccataatgaatgtgaaaaatccttcctgatgaaaggaatgctatttacacatactagagctcacagaggagaaagaacctttgaatacaataaagatggaattgccttcatagaaaagtcaagcctcagtgtccatccaagtaatcttatggaaaagaagccctctgcctacaacaaatatgggaaattcctctgcagaaagcctgtttttattatgcctcagagacctcaaacagaagagaaaccctttcactgtccttactgtgggaataactttagaaggaagtcatacctcattgaacatcagcgaattcacacaggtgaaaaaccttatgtttgcaatcaatgtggaaaggccttccgtcagaagacagccctcacccttcatgagaaaacacatatagaggggaaaccctttatttgtatcgattgtgggaagtccttccgccagaaggccaccctcactagacatcacaaaacacatacgggggagaaagcctatgaatgtcctcagtgtggaagtgcctttaggaagaagtcatacctcattgatcaccagagaactcacacaggagagaaaccgtatcagtgtaatgagtgtgggaaggcatttatccagaagacaaccctcactgttcatcagagaactcacacaggagagaaaccctatatttgcaatgaatgtgggaagtccttctgccaaaagacaaccctcactctccaccagagaattcacacgggggaaaaaccctatatttgtaatgaatgtgggaagtccttccgccagaaggcaatcctcactgttcatcacagaatacatacaggagaaaaatccaatgggtgtcctcagtgtgggaaagccttcagtaggaaatcaaacctcattcgccatcagaaaactcacacaggcgagaaaccatatgaatgtaaacagtgtgggaagttcttcagttgtaagtcaaacctcattgtccatcagaaaactcacaaggtagaaaccacgggaattcagtaagtaatgtggctttttttgtaaaaaaatgttaagtcatagtaaaccctgtagatgatgttgcttgcaagcgtaatatccaacagtttaaggtactataccacatggtaacctactgtttgccagcctgtaaaacacacacacacacacacacacacacacaaatattattagacaaattagatgacaaaaatcattaagaagtccaaactttttttttattactagcttcagcagacaaaaacttcctctgtcaaggtgttataaacatttaaaatcacattttccatttccatacatatctttttgttcatcagtaataactagttggccaactgactgtggtccatggactacacagtgagtagaggttctttaaaagaaggaggtatgaactgtatttctcattgcaaatacaaaataaaaattagttgttacctcctcacagttgaccatgattctgacttctaacattacaaattagtttttactattataaacctttctataaattggattatatatcatgtattctttcatatacagcttattaccttcatcatgtccgtgagtctaatcattagtacgtgtggcagaagtttatttatttttatccagtatagaattcaattatatgattatatcacaatttatccattctgctgttgatggacttttacattgtttacagcttagggtcataataaatcatgcttctgagaacatacttgtcttggtgtacatacatgtatttctcttgtgtatatacttaggagtggaatcgctgggtcttagagcatgtgtgtattcagtcagatactggcagacaattcagaactttcaccacatgagataattgacactgaagggaaacagctataaattttatcaatatggtgctggttcaaaccagagaattcatgctgcagggaaactcaatcaatgttattgtgaaaactgggaatgtgaatgtaatatatgtagaaaaacatttagccacagcccaaatcttccaggcaaatgtaataaacgtgacattgccgttagccaaaaaaaaaaaaaaaaaa

SEQ ID NO: 2491 - DNA, 1292 bp, Homo sapiens
gggagtcggagaaaaagctgacctaatgaaactgtggcaacgtcagcgcttgaggcttgaagagggagacaagctaaaagaggatatccagttgtttcatgatggcatttgcacctccaaaaaacacagatggtcccaaaatgcagacaaagatgagcacctggacacccctaaaccatcagctattgaatgaccgggtatttgaagaaagaagagccctgcttggcaaatggtttgacaaatggacagactctcaaagaagaagaatcctcacaggcctgttggagcgctgctcgctgtcccagcaaaagttctgctgtcgaaagcttcaagagaaaattccagcagaagccctggactttacaaccaagcttccaagggtgttatctttatacatcttttctttcctggaccctcggagcctttgtcgttgtgcacaggtgtgctggcattggaagaaccttgctgagctggaccagctctggatgctgaaatgtttacggtttaactggtacatcaatttctctccaactccctttgagcaggggatctggaagaagcactatattcaaatggtgaaagaacttcatattaccaagcctaagacacccccaaaggatggatttgtaatcgctgacgttcaactagttacaagcaattctccagaggaaaaacagtcccctttatcagcttttcggtcctcttcctctttaagaaagaagaataactcaggggagaaagcacttccaccctggcgatcttctgataagcacccaacagatatcattcgttttaattacctagacaaccgtgaccccatggagactgtccagcaaggaagaagaaaaagaaaccaaatgaccccagacttcagccgacagtcacatgataagaaaaataaattgcaggacagaactaggctaagaaaagcacaatcaatgatgtcgaggagaaatcccttcccactatgtccctaagtgccagctctcccctaaaagttccagctcatctcgcctggcctccccctgagtcagtgggactcccagacactgccaccacagctgaaattctcatgcagcatcctcacaggcaccctgggccccaagcatgactcatccaggttccagagccaaagtggactgaacatggaaagacttttattatagaaatgacaagatgctttgcacagtggagagctgaatttacttggctcccattagaaactctttcagcttaagtacttattgtggtagtgagtcctacggtatttcagtaaaaaggaattcatggca

SEQ ID NO: 2492 - DNA, 4807 bp, Homo sapiens
aagtgcgcatgtgcgcgaggagtcgctcgggcacttattgagcgccgactgtctacgggcggccgggggtgatgggcagaggcttcagtgtccccttcgcctccgcaggagaggagaggcagcagcatggcgagtgtcctgtcccgacgccttggaaagcggtccctcctgggagcccgggtgttgggacccagtgcctcggaggggccctcggctgccccaccctcggagccactgctagaaggggccgctccccagcctttcaccacctctgatgacaccccctgccaggagcagcccaaggaagtccttaaggctcccagcacctcgggccttcagcaggtggcctttcagcctgggcagaaggtttatgtgtggtacgggggtcaagagtgcacaggactggtggagcagcacagctggatggagggtcaggtgaccgtctggctgctggagcagaagctgcaggtctgctgcagggtggaggaggtgtggctggcagagctgcagggcccctgtccccaggcaccacccctggagcccggagcccaggccctggcctacaggcccgtctccaggaacatcgatgtcccaaagaggaagtcggacgcagtggaaatggatgagatgatggcggccatggtgctgacgtccctgtcctgcagccctgttgtacagagtcctcccgggaccgaggccaacttctctgcttcccgtgcggcctgcgacccatggaaggagagtggtgacatctcggacagcggcagcagcactaccagcggtcactggagtgggagcagtggtgtctccaccccctcgcccccccacccccaggccagccccaagtatttgggggatgcttttggttctccccaaactgatcatggctttgagaccgatcctgaccctttcctgctggacgaaccagctccacgaaaaagaaagaactctgtgaaggtgatgtacaagtgcctgtggccaaactgtggcaaagttctgcgctccattgtgggcatcaaacgacacgtcaaagccctccatctgggggacacagtggactctgatcagttcaagcgggaggaggatttctactacacagaggtgcagctgaaggaggaatctgctgctgctgctgctgctgctgccgcaggcaccccagtccctgggactcccacctccgagccagctcccacccccagcatgactggcctgcctctgtctgctcttccaccacctctgcacaaagcccagtcctccggcccagaacatcctggcccggagtcctccctgccctcaggggctctcagcaagtcagctcctgggtccttctggcacattcaggcagatcatgcataccaggctctgccatccttccagatcccagtctcaccacacatctacaccagtgtcagctgggctgctgccccctccgccgcctgctctctctctccggtccggagccggtcgctaagcttcagcgagccccagcagccagcacctgcgatgaaatctcatctgatcgtcacttctccaccccgggcccagagtggtgccaggaaagcccgaggggaggctaagaagtgccgcaaggtgtatggcatcgagcaccgggaccagtggtgcacggcctgccggtggaagaaggcctgccagcgctttctggactgagctgtgctgcaggttctactctgttcctggccctgccggcagccactgacaagaggccagtgtgtcaccagccctcagcagaaaccgaaagagaaagaacggaaacacggagtttgggctctgttggctaaggtgtaacacttaaagcaattttctcccattgtgcgaacattttattttttaaaaaaaagaaacaaaaatatttttccccctaaaataggagagagccaaaactgaccaaggctattcagcagtgaaccagtgaccaaagaattaattaccctccgtttcccacatccccactctctaggggattagcttgtgcgtgtcaaaagaaggaacagctcgttctgcttcctgctgagtcggtgaattctttgctttctaaactcttccagaaaggactgtgagcaagatgaatttacttttcttaaaaaaaaaaaaaaaaaaaaaaaaaaagagtttctggctgatgggtgactcagagtgcaggactgcctggccgtggggcagaggggtttgcccttctcggagggtacctcctgttccctgtctgagcatcctgcatggaagtcaaaggaaatccctttcttggtgacgacttaaatctgggttccctcagacattgggttgcaccccaacaaatattaaatggcttcttcttaaagcccagagaaagaggttttttaaaagactgtcgccaaatagctgagccaaaaggctgatcagaattcactttttggaatgtggcagttaaacactaccttgatcattctctcctctttcctcgaggaactcctggagggtttgagcgtctggaaactctctgctctgacccgaggaagcaccctcctgacgccgccttcctccggttattgaaaggacgcctcagaaatgctttgttttcttttacgatgtattcagaagcctttactgattaaagttttcttttatttgggtggccgggagagacccagggaggttctggaggttcctttctgtctcctggccccaccagggatttccccatttctgtttgctgcctgaaagcaggatgaggaaggccaaggagagtccttgcacccgtgagcgtcaggatgaggaaatgacaggaggaagacgtgggtttgggttagtggctgctggcgttttggcccttggtgtttctggagcctccagggatctaggggagcctgggctgcgtgcatgtcgataagcagagctgttcttggggagaaggagggaggtctcgggagtgtagcaccatgccaaccagccctgcgcgaagacagagtgagccacgcccggatggcagggcatgtttctgttttggtgtctcactttcctcccagcgtgacttatttggggattcctcagggcctactggaatgtgactgcccactgcccagctgcctcgggtacaagtcctggccctatgtcccagctgtcaggggctcagggaatcctacccagccacctgtcctgggatggagtgtcagcatccaccccttggttgtcatcgaggccgccctcccagtcctgggtgaagatatttgggccaccagggctcccttggccccttcacgtaggaaatagacacgtgctttttaatgcaggacactttgagtgttacaaaatctgtagacctggcagtagggtcatgatgttgggaagggtgtagtgccctaggttggtgacagaagggacagacacttgtgcacaggtgtctttggtgatggggtttttttttttataacttagtaaaaaaaaaaaaatgtatgtggaattctgtctcttggtaaagctcaaagccaggctagcctgaggtggcgcagggctctccttcctgtcccttcgatctccttgagaattaagagctggcagctgctgatggtgtttcccaacccccctcacttcccaagacaacccccagcttcaggtcctcatggggaggggagggcacgttcttgacacatgggaacttcgctcaggagggcctccccttcccctctccctcagagttttcactgccgtctcgtctttagaaagctgtttgaattccccccgcccccagtttggaccgtgtagatataactggatatacggatttttctctttgtgcaggcttcttatgccgttggtatacagggcaggaaagagaggaataaagggagagagcagtgtggaaaccacggtggttttgctttgttcttactaggttttggtgccaccttccctgcctgcgcttgtgccccctctcctccttggcactggcggcctccttgcctcccttccacccgtgctgccatcccgtgcctgtcgtgttggttcttcacacgtgctctgttctcggggttgttccattcatgccttcttggagggtgagggtggcttgggaaccgacccagtgatcatgcctactttcttctttgtatctccctccttcccagcccacccgggcagcagactctgatggaaggaaggtgccgtaggtgggcttttagaaactaacgggactggttttcaaagcagttatcttgggaaactgtttattccagcgatgtgacttttttcagaatatttcttggaatcatattcagagtctggggctgtgtgttgagcagccttaaggatgctagacactcatttagtgcccagggagtccagcgaatgacgtctgtggccaagcgaggtctcaggtgcaaagcaaaaggaccatttaaagtaaaatagcttggattcaatcatgtgacttttaaattggctcagaaagcaattttgtaatttcagagagtgttttgagccatggccacgttgtcattgtgagtctatagcttgactccttggagaacaatattcatttggttgtggagactgatttgctgggagaaatctgtcctgttactttctggtcatcccaggttctgacttttaccaggggcaaaaaaaaaaaaagcaagagggagataaatcccatctgtgagtttgtcttattggcgcctttttcctcagctgtcttccaagtattatttttactgttaaaaaattttttaaaaatgtgaaatgtaatgtttttacagcaacaatatgaaatatattttataaggaataaaatggtaccttgtctgatttaaaaaaa

SEQ ID NO: 2493 - DNA, 4315 bp, Homo sapiens
gccggaaaggacccggcctcgagatggcagagcggaggcgttccctgggctgagctgagcacctcctccctgagacagcagcggtctaacccccggcgcgggagggacccagccagggggctgtcctagtagattccggcattgcctccaccccgctgtggcggagacgcagagggcgggtcgcgctcgagggtcagggaggagagtgacccggccctggtccagggccctccctgcccgccttggggccagaactccagccctggggagtgggcagggcctgttttccgtgcctcacgccctgcttttcgcctccttcagcgctgtctgctagctgcttttcctgctctctctccctggaggcgaacccttgtgctcgagatggcagccaccctgctcatggctgggtcccaggcacctgtgacgtttgaagatatggccatgtatctcacccgggaagaatggagacctctggacgctgcacagagggacctttaccgggatgttatgcaggagaattatggaaatgttgtctcactagattttgagatcaggagtgagaacgaggtaaatcccaagcaagagattagtgaagatgtacaatttgggactacatctgaaagacctgctgagaatgctgaggaaaatcctgaaagtgaagagggctttgaaagcggagataggtcagaaagacaatggggagatttaacagcagaagagtgggtaagctatcctctccaaccagtcactgatctacttgtccacaaagaagtccacacaggcatccgctatcatatatgttctcattgtggaaaggccttcagtcagatctcagaccttaatcgacatcagaagacccacactggagacagaccctataaatgttatgaatgtggaaaaggcttcagtcgcagctcacaccttattcagcatcaaagaacacatactggggagaggccttatgactgtaacgagtgtgggaaaagttttggaagaagttctcacctgattcagcatcagacaatccacactggagagaagcctcacaaatgtaatgagtgtggaaaaagtttctgccgtctctctcacctaatccaacaccaaaggacccacagtggtgagaaaccctatgagtgtgaggagtgtgggaaaagcttcagccggagctctcacctagctcagcaccagaggacccacacgggtgagaaaccttatgaatgtaacgaatgtggccgaggcttcagtgagagatctgatctcatcaaacactatcgagtccacacaggggagaggccctacaagtgtgatgagtgtgggaagaatttcagtcagaactccgaccttgtgcgtcatcgcagagcccacacgggagagaagccataccactgtaacgaatgtggggaaaatttcagccgcatctcacacttggttcagcaccagagaactcacactggagagaagccatatgaatgcaatgcttgtgggaaaagcttcagccggagctctcatctcatcacacaccagaaaattcacactggagagaagccttatgagtgtaatgagtgttggcgaagctttggtgaaaggtcagatctaattaaacatcagagaacccacacaggggagaagccctacgagtgtgtgcagtgtgggaaaggtttcacccagagctccaacctcatcacacatcaaagagttcacacgggagagaaaccttatgaatgtaccgaatgtgagaagagtttcagcaggagctcagctcttattaaacataagagagttcatacggactaagctgtaattatgatggctgagaaatgattcatttgaagatacaattttatttgatatcaatgaacgccctcaagactgagctgcttttatcatactctcctagttgtgggccacgatttaaaccatcagagatgacaagccatttgaaattctgaccctcagctttgggaatgttatctcctccaaaatggtgatttttattcactcaatgggttacttcattaaaagcagccccacaagtaactggaaatctgaagaccaggggacaaatgctggtgaatgcttaggcctggaaatggagtaaatctttcaatgttattttctcccatccttggcccaaggaactatgctaagtgaaacgtgggactgtaatagggtggtaatggctgctttggaaaaaggcaactagagactctgcctaaattgccacacctattcacacaccatagtagttgggcacacacatcttcccttccaaagggctttttccttgagttgctcatgcatttgtatcttttccatcttcctgagggcaagattttgcacgatgaaggcaatgattgtaacttttctccttctcattgtttctaattagctcctttaaagcttgcatctttgtgaaggctaactgaagatacggttggaaaggaaaaatgagacacaggtttggggaccaaggacccatcaatgatggtgactttagcagaagatgcccacagttattactgccattaatcagatttatgaattttctttggggatcactatagggaatattgtatagaaaatatcttcaagaaaagataggaccatcagtgacagttaagtgtaaggagcaagtggaattgagtccttcagggaaggaaccacagagtcccttcccaaggaatgtaggtcgtttctgtgttctttcccttctaatctttaagatcaactcttcctatcctgctaactctaagatttgataagggccacatcccagtgtttatcttagcttgcatcagggcatgtgtatgtacagtaatgtgtattcctgtggtttttctaatagaaactgaatttacagagacttagcatgttcttgggtgatgtgagtcatgtgacagaagtacagacataactccaatgtgagaaatgtccttttttcattatggaaaataatttaaacactagtgctttagtgtgcactctcctgtaaggtctgtctttgtacagagctaagcacttgtttgtatgtgtttgtcaattgtggaagataatgaccagacaaataggtcgattgtcctattctcagaatgaattatcttctatggtaatgaagaactctttggcttagtcagaaggaattaacgaacctcggtaggaatgtatttccatcctcccaccctacagatataagaggttaaaataacagttcgcccaatttaagcccagtagtgtcagttttcctaatctcagtccaggtaggaattaagaaatatctcaagtgttgatgctatccaagcatgttggggtggaagggaattggtgcccagaaaatgggactggagtgaggaatatcttttcttttgagagtacccccagtttatttctactgtgctttattgctactgttctttattgtgaatgttgtaacattttaaaaatgttttgccatagctttttaggacttggtgttaaaggagccagtggtctctctgggtgggtactataatgagttattgtgacccacagctgtgtgggaccacatcacttgttaataacacaacctttaaagtaacccatcttccaggggggttccttcatgttgccactcctttttaaggacaaactcaggcaaggagcatgtttttttgttatttacaaaatctagcagactgtgggtatccatattttaattgtcgggtgacacatgttcttggtaactaaactcaaatatgtcttttctcatatatgttgctgatggttttaataaatgtcaaagttctcctgttgcttctgtgagccactatgggtatcagcttgggagtggccatagatgaccgcatttccatgacctaactgtatttcacccccttttccttccctactgttcttgccccaccccaaccagttcctgctgctgcttttggcttcttggaggtgaagggcttaaaacaaggcttctaagcacccagctatctccatacatgaacaatctagctgggaaacttaagggacaagggccacaccagctgtctcctctttctgccaattgttgcccgtttgctgtgttgaactttgtatagaactcatgcatcagactcccttcactaatgctttttgcatgccttctgctcccaagtccctggctgcctctgcacatcccgtgaacactttgtgcctgttttctatggttgtggagaattaatgaacaaatcaatatgtagaacagttttccttatggtattggtcacagttatcctagtgtttgtattattctaacaatattctataattaaaaatataatttttaaagtca

SEQ ID NO: 2494 - DNA, 2352 bp, Homo sapiens
agtagcgaccatttccattggcgttagggagtccttggagcgctgtgttgggaccgtggtggtgactggatccaggaggtcgagagtcgttcttctctttgcacagacgtgactctgcagctctttaacggcgcccgctgctctcaacccagcttaccccacgtggtcccatggcggcggccgcgctaaggttccccgttcagggcacagtgacttttgaagacgtggctgtgaaatttacccaggaggaatggaatctccttagtgaggctcagagatgcctgtaccgtgatgtgacgctggagaacctggcacttatgtcctccctgggttgttggtgtggagtggaagatgaggcggcaccttctaagcagagtatttatatacaaagagagactcaggtcaggactcctatggcaggtgtgtctcccaagaaggcccacccctgtgagatgtgtggcccgatcttgggagacattttgcatgtggcagatcatcagggaacacatcacaagcagaaactgcacaggtgtgaggcctgggggaataaattgtatgacagtggaaactttcatcagcaccagaatgagcacattggagagaaaccctacagagggagtgttgaggaggcgttgtttgcgaagaggtgtaagttgcatgtgtcaggggagtcatctgtcttcagtgagagtgggaaagactttttgctcaggtcaggattactccagcaagaggccactcacactgggaagtcaaacagcaaaactgagtgtgtgtctctgtttcatgggggaaaaagccattacagctgtggaggatgcatgaaacattttagcaccaaagatatactcagtcagcacgagagactgctccctacagaagaaccttctgtgtggtgtgaatgtgggaaatcctctagcaaatatgacagcttcagtaatcatcaaggagttcacactagagaaaaaccttatacgtgtgggatatgtgggaaattatttaacagtaagtcccacctccttgtacaccagagaattcacactggagagaagccatatgagtgtgaggtttgtcagaaattttttaggcacaagtaccacctcattgcacaccagagagttcacactggagaaaggccatatgaatgcagtgattgtgggaagtcatttacccacagctctacattccgtgttcataagagagttcacactggtcagaagccttatgagtgcagtgaatgtgggaaatcttttgccgaaagctccagtctcactaaacacaggagagttcacactggagaaaagccttacgggtgcagtgaatgtgaaaaaaaatttaggcaaatctcttcacttcgtcatcatcagagagttcacaaaagaaagggcttatgagtgcagtgagtccagtctcattaaatattggagaatacacacctgagtaagatcctgtgattgcagcaaatgtggaaaatgtttacccaaaggtctgctctccttggatattggagagttcacactagagaagagtccttacaagtaaaataaatttgggcagttttgtagccacacctctgtattccttcaggattatagttaacactgaatgaaggccttactagtgtgacaaatacaggatatttatccagaagtctggctgcataactcacaggagagctgtcatgtgggaggattgctacatgggaggatttgcttgagcctgggaggcagaggttgcagtgagccgagattgcaacactgcagtccagtctggaccacagagtgagaccctgtttcaaaaataaaatatataaatgacatccaataaagtatgcatatttgagctgtaggataagtcttgaattttctttttcttttttttgagacagcctcgctctgtcacccaggctggagtacagtggcataatctcggctcactgcaagccctgcctcctgggttcatgccattctcctgcctcagcctccctaatagctgggactacaggcaaccaccaccactcctaccttttttgtatttttagtagagatggggtttcaccctgttagccaggaagttctcaatctcctgacctcgtgatctgcccgccttggcctctcaaagtgttgggattgcaggcgtgagccactgctcctggcttgaattttcttataatcccatgaaaccatcatcagagtcacaataatgaatttatctaatctatcacctttgtattcacctggagcctttataaagtttttctctatgcagacaaccattgatttactctgctgtataatactttccattttctagaattttctgactgatgtaataaagtgtttcctcttataa

SEQ ID NO: 2495 - DNA, 653 bp, Homo sapiens
ctgacgtagctgatcggcccggaagtgctcacacgtgtgctccctgccctgctcctggccccttggccggccgggctgtttctggccatgggtcgctcccgccggacaggcgcgcaccgagcgcactctctagcccggcagatgaaggcgaagcggcggcggccggacttggatgagattcaccgcgagctgcggcctcagggatccgcacgaccccagcccgacccaaacgccgagttcgaccccgacctgccagggggcggtctgcaccgctgtctggcctgcgcgaggtacttcatcgattccaccaacctgaagacccacttccgatccaaagaccacaagaaaaggctgaagcagctgagcgtcgagccctacagtcaggaagaggcggagagggcagcgggtatgggatcctatgtgccccccaggcggctggcagtgcccacggaagtgtccactgaggtccctgagatggatacctctacctgacatggcctgaagatgcagggcagaggaattgcccatggacagtgacgcaaggactaggctgggagggagcgtgccaaccccttttgcctctgggtttggggagcggagggcctcttcttggtgccctgccccaaataaaggaactggacaaagagaaaaaa

SEQ ID NO: 2496 - DNA, 4182 bp, Homo sapiens
agacgcagagtagattgtgattggctcgggctgcggaacctcggaaacccgaatgtgaggaccttaagggatccacagctgccgccccccgcagccatccagagcgcggtcacagtccgactggcggcacggaggcggcggcggcggcggcggcggcagcggcggcggcagcggcggcggcagctgtagctgcagcagcaggtaaagagagcgttttcccaaagaaaataacatagcacagaaggaaaaataaaaagaaattgctgcagattttactttatgtgagaaaatctacaatttcttcgagacactcatataaagatattggtgaatgaactttgctaagtatggattcaggcggtggaagtcttggattgcacacgccagactctagaatggcccataccatgattatgcaagattttgtggctggaatggctggtactgcacatatcgatggagaccatattgttgtttcagttcctgaagctgttttagtttctgatgttgtcacagatgatgggataactcttgatcatggccttgcagctgaagttgtccatggacctgatatcatcacagagactgatgtagtaacagaaggtgtgattgttcctgaagcggtacttgaagctgatgttgccattgaagaggatttagaggaagatgatggtgatcacatcttgacttctgaactaattacagaaaccgttagggtaccagagcaggttttcgtggctgaccttgttactggtcctaatggacacttagaacatgtggtccaagattgtgtttcaggagtcgactctcccacaatggtatcagaggaggttcttgtaactaattcagatacagaaactgtgattcaagcagctggaggtgttcctggttctacagttactataaaaaccgaagatgatgatgatgatgatgtcaagagcacttctgaagactacttaatgatatctttggatgatgttggagaaaaattagagcatatggggaatacaccattaaaaattggcagtgatggttcacaagaagatgctaaagaagatgggtttggttctgaagttataaaagtgtatatatttaaagcggaggctgaagatgatgttgaaataggtggaacagaaattgtcacagagagtgagtacaccagtggacattcagtagctggagtgcttgaccagagccgaatgcagcgggagaagatggtttacatggcagttaaagattcttctcaagaagaagatgatatcagagatgaaagaagagtttcccgaaggtatgaagattgtcaagcatcaggaaatactttggactcagcattagaaagcagaagtagtacagcagcacagtaccttcaaatttgtgacggcattaatacaaataaagtacttaaacaaaaagccaaaaagaggagaaggggagaaaccaggcagtggcaaacagctgttataataggtcctgatggacagcccctcacagtgtacccttgccatatttgcacaaaaaagtttaaatccaggggattcttaaaaagacacatgaagaatcatcctgatcatttaatgagaaaaaaatatcagtgtacagattgtgactttacaactaacaagaaagtgagtttccataaccacttagaaagccataagctcataaacaaagtcgacaaaacccatgaatttacagaatacacacgaagatacagagaggctagtccactgagttccaataaacttattttaagagacaaggagccgaagatgcacaagtgcaaatactgtgactatgaaactgcagaacaaggactgttaaacaggcatttgttggccgttcacagcaagaattttcctcatgtttgtgttgagtgtgggaagggttttcgacatccttctgaactcaagaaacatatgagaacccatactggtgagaagccatatcagtgtcagtattgtattttcaggtgtgcagatcaatcaaatctgaaaactcacattaagtctaaacatggtaacaatttgccatataaatgtgagcattgtccccaagcatttggtgatgagagggagcttcaacgccatctggatttgtttcaaggacataagacacaccagtgtcctcattgtgaccataagagcaccaattcaagtgaccttaagcggcacatcatatctgtccatactaaggattttcctcacaaatgtgaggtctgtgataaaggttttcatcgtccttctgagctcaaaaagcatagtgatatccataagggtaggaagattcatcagtgcaggcactgtgactttaaaacatccgatccatttattcttagtggccatatcctttcagttcatactaaagatcagccattgaaatgtaaaaggtgcaagagaggattcagacaacaaaatgagctaaaaaaacatatgaagacccatactggaaggaagatttaccaatgtgagtattgtgaatacagcactacagatgcatctggctttaaacgacatgtgatatcaatacatacaaaagactatccacacaggtgtgaattctgcaagaagggattccgaagaccatcagaaaaaaatcagcatattatgaggcaccacaaagaggctcttatgtaataagatcaatataaagaaagaagctatttaggagatatgatatgctacttgggagaaaactctcactaactgtctcaccgggtttcaaagcttgatactaaaccatgactttacattctttgtattaaagatcttaaaatatttgaattcacaggggatcccatagccctttgaaaattacttaaagaatttaagaagcactatagaatggttacagaaaaacttcttaagtatctgtgtaatagtattatatgcatacttaaactacagaggggaaaagcaaagacaaatactttatttggctgattatgttagatacaaatgtttctgagaagagaatacataattgagtttagtgatgctttgctatagcaagcaaacccacttttatgcaattttagaaatggggcagggaaacaaaatgtggtcattcatcagtcacttagtcattgagccttttatattgtacctggaaattaaattccagcaatgacaaaagttttgtgtattcattaaaagaaaactaactggaaaacaggttagattaattcagtactattaaaaaagaattcagagctgttaatattttatcacaggataggatacttaaaatatagcattctgtgctgagatctaaggtgaagtctataaagattaaagttcccttttttctgatgttcaagttgattgttgttcagtatggcatatatgacaaaagtatatttgagtcaaatgtggctttctaaaatggatgcaacattagcgttgcaaacaaaatcagcactatatttcttaatgatctaaagattaatttgagagaacacagttttcttaaatattataatgtctagagtttttttaggacagtcttagcaagtatgattgttctagtcttacttgctctaatgtttaaaggtgcaattttatgccattattgaaattgatttttaaaatctatataccatatgattaacatgcattttcaatatgaggcagtgtttatgcagtatttaacagagcaatctgctgccaatagagtttggaggtggatatttagtttacagtgtataaacttaaaatatgcatccctttaacaacgctttgtgttagcatgctgcaaatcaaaatggcacttaatattaaaagctggtttagggaaattttatgaaaatcctgttcataaatgtaatgcatatgatatgtacttttaagttttagttgcttcatgtttacattcagctgttcaacataattaaaatgtaattttacttcatgctatattgtggctttgtgtttcaaataatgttcacctttctgtttttgcaccagataagaatcagttccttgagaataaattttttatctttcttaacttcagaatattaaatttggaatatctactaaaattgtgtgttatgtggctgtaaatgatgtacacgctgtaaaataagatcgctactgttatgtgggattattatttctaaatgttactcattgaaatgagcatacaataaaaagcatttattgcacttaaaaaaaaaaaaaaaaa

SEQ ID NO: 2497 - DNA, 4239 bp, Homo sapiens
gaaaactcacagggtgcgtcgctggtaacccatgctcccataaagcctggcctctggaaagagacttgggaacgagccctgacgttctcagccgtcgagcttcacagagaagggtagctcgaattaggttccttatcttaaagagaataacagcagtcactttctcacaatcttgcgaacgccaaatggaaggatccctcgagagcgctgagaactcgccgagctcctcccgggaaacccggtaccacgaggcgccattttgcggatgggcaaaccgaggcccgcggggccgcgacttacccaggcctttttgcagtgggaggcgacggtggaggagggtggtctgggaccgggacaacaaagtccatcctgccgccggcttcgacgcaggtgccagaaaggtcccaaccccgcccaggcagggcgaggcggcgcggcccaggaacctgtcatggcggcgccgctgcccgacgccggaagtgcccgcctggaactacagctcccagcagaccccgcggcgcgctccggtcgacgccggggaagcagccgccattgtccgcggctgaggttgggatttgctgtgttcctgggcaggtgcctggtcaatcagtcctcgggatggcagccatcaacccgtgggcctcctggggtgcccttacggaccaatcttgggggatgacagctgttgacccatgggcctcctgggctctgtgtcctcagtatcctgcctggcacgtggagggaagcctggaggaggggaggagggccactgggctcccagcagcccaggttcaggaaccagtgaccttcaaggacgtggccgtggacttcacccaagaagagtgggggcagctggaccttgttcagaggaccctgtaccgtgatgtgatgctggagacctatggtcacctgctctctgtgggaaatcagattgccaagcctgaggtcatctccctgttggagcaaggagaagagccgtggtcagtggagcaggcatgtcctcaacgcacttgtccagaatgggtgagaaatcttgaaagcaaagcattgatcccagcacagagcatttttgaggaagaacaatcccatggcatgaagttggaaagatatatatgggatgatccttggttctccaggttagaagttttgggatgtaaagaccaattagaaatgtaccacatgaaccagagtacagctatgaggcagatggtcttcatgcaaaagcaagtactatcccagagaagctctgaattctgtggacttggggcagagtttagccagaacttaaactttgttccatctcagagagtttctcagatagaacatttctataagcctgatacacatgctcaaagttggagatgtgactcagccataatgtatgcagataaggttacctgtgaaaataatgattatgacaaaactgtttatcagtccattcaacctatttaccctgcaagaatacaaactggagataatcttttcaaatgtactgatgctgttaaatctttcaatcatataatacattttggtgatcataaaggaattcacacaggagaaaaactctatgaatataaggaatgccatcaaatctttaaccagagcccatcatttaatgaacacccaaggcttcatgttggagaaaaccagtataattacaaagaatatgagaatatcttttatttctcatcctttatggaacatcaaaaaattggtactgtagagaaagcgtataaatacaatgaatgggagaaagtctttgggtatgactctttccttactcaacatacaagcacttacactgcagagaaaccctatgactacaatgaatgtgggacgtctttcatctggagctcttaccttattcaacataagaaaactcatactggagaaaaaccctatgaatgtgataaatgtggaaaagtttttaggaatcgctcagcccttacgaaacatgaacggactcacactggaataaaaccctatgaatgtaataaatgtggaaaagccttcagctggaattctcatcttattgtacataagagaattcatacaggagaaaaaccttatgtttgtaatgagtgtgggaaatctttcaactggaactctcatcttattggacatcagaggactcatacaggagagaaaccttttgaatgtactgaatgtgggaaatcattcagctggagctcccatcttattgcccatatgagaatgcatactggagagaaaccctttaaatgtgatgaatgtgaaaaagcttttagggactactcagcccttagtaaacatgaaagaactcattctggagcaaaaccatataaatgtactgaatgtggaaaatccttcagctggagctcccatcttattgcccatcagagaactcacacgggagagaaaccatataactgtcaggaatgtggcaaagcattcagagaacgctcagccctcactaaacatgagataattcattctggaattaagccctatgaatgtaataaatgtggaaaatcctgtagccagatggctcaccttgttagacatcaaaggactcatactggagaaaaaccctatgaatgcaataaatgtggaaaatccttcagtcagagctgtcaccttgttgctcatcggagaattcacactggtgagaaaccctataaatgtaatcagtgtgaaagatcctttaactgtagttctcacctcattgcacaccggagaactcatactggagagaaaccatacaggtgtaatgaatgtgggaaagcatttaatgagagttcatcccttattgtacacctaagaaaccatactggagaaaagccctacaaatgtaatcattgtgaaaaagcattttgtaagaattcttcccttattattcatcagagaatgcatagtggagagaaacgctttatatgcagtgaatgtggaaaagcctttagtggtcactcagccctacttcaacaccagagaaatcacagtgaagagaaactgaattgaatttatgcgagtttttcgtttcttgtacatttgacaacacattgaggaaaaccctataaacataatcaagaggggacatttttcattaagagttcagtaagacttctcccacattatttactagaaaatatcatcttagaagaaaccccatgaaggaaaagaatagggaaaagctttcagcagttatttagcccttactcaaaatcagataattaacaatgaaggaaactctaaactccccttatggtctaccagtaattcatacttgaggaccatgactgtggggaatgaggcatcttttagcaagagctctcaccaattgtagattggtgtgaattgctaagggaaaaaccttatgcagagaaaagtttttgactggaaatacactgttttgcatcaagctggagtactggatggaaaactctacaataacattttgtgcataattgtagaaatacagattttgttgttataaggggagggtctgggtgcccaggagtagaatatgaagtgctaaatctgaatgtaagaaaaataatagtattgaatggggtatttactgttgattaacctccttagagaaaattaatgaatgagatgactaacggtagaaaagttattgcctaggagtgtgagactgatgttgctggacagaaagtgatccttagcccagtgtgtcagcgtccattgttactcatcactgcattgttgggcaattagtttgtaatttgttttaggcaatcactataaattataattatggacactgcatcagtatacataacatgaaggaataaaaaggatacagaattgtatatacatacttactgtaacacatctaaaaaaatgtatatgggtaaggacctgaaagatccatggaaaagttaacccagttgagatttttaaaaagttttacaaatacatataacacttatgtgctgggctttcttttaaatgctttccaagtgttaacttgtttagtcccctttactctgagataggtactgttaccccagttttacaaatggctaagctgaagcagagatgttgaaggatcctacctaaggggcacaactagtaagggagtagagctgagattggctccagagttcttgttttcagccaccattttatgctgcctctccagtgattttttttcccattttcttcagtgtttctatagcagagatttgataataaaaagaaaatcctaaacaatgagaaataaaaaaaaaaaaaaaa

SEQ ID NO: 2498 - DNA, 3013 bp, Homo sapiens
caacgagttgtagccgcggagagcaggcgtcgatgctggcgcccaaagcctccagcctgagagtcgcctcactcgtgtgacgacagagtttcactcctgttacccaggctggaggacagtgatgtgatctcgggtcaccacaacctccgcctcccggattcaggcgattctcatgcctcagcctcccgagtagctcagattacaggcatgtgccaccacgcccggctaattttgtattttcagtcgagacggggtttccccatgttggtcaggctggtcttgaattcccgacctcaggtgatctgttcgcctcggcctcccaaagtgctgggattacaggcgtgaaccactgcacccggcgaggcattttttactgtctacagaaacttattgtaattcatttttcctcactccagtagtaagaattataccaaattgaaaagatatgaatgagtatcctaaaaaaagaaaaaggaagactctacacccttctcgttattcagattcctctggaataagcagaattgcagatggattcaatggaattttctctgatcattgttacagtgtctgttctatgagacagccagatttaaaatattttgacaacaaagatgatgattctgataccgagacgtcaaatgacttgccaaaatttgcagatggaatcaaggccagaaacagaaatcagaactacctggttcccagtcctgtacttagaattctagaccacactgccttttctacagaaaaatctgctgatattgtaatttgtgatgaagagtgtgactcacctgaatcagtcaaccagcaaacccaagaggagagtcctatagaagttcacactgctgaagatgttccaattgctgtagaagtgcatgcgatttctgaggattatgatatagagacagaaaacaattcctctgagagtctccaagaccaaactgatgaagaaccgccagctaaactttgtaaaattcttgacaagagccaagctttgaatgtgactgcccagcagaaatggcctttactgagagctaatagcagtggcctctataaatgtgaactttgtgagtttaacagcaaatatttttctgacttaaagcagcatatgatcctgaagcataaacgtactgattcaaatgtgtgtcgagtatgcaaggaaagtttctctaccaatatgcttctgatagaacatgccaaactgcatgaagaggatccctacatttgtaaatactgtgattataagacagtaatttttgagaacctcagccagcacattgcagacacccattttagtgatcacctctattggtgtgaacagtgtgatgtacagttctcctcaagcagtgaactctacctacatttccaggagcacagctgtgatgaacagtacttgtgtcagttctgtgaacatgaaactaatgatccagaagacttgcatagccatgtggtaaatgagcatgcatgtaaattaatagagttaagtgataagtataacaatggtgaacatggacaatatagcctcttaagcaaaattacctttgacaaatgtaaaaacttctttgtatgtcaagtatgtggttttcggagtagacttcacacaaatgttaacaggcatgttgctattgaacatacaaaaatttttcctcatgtttgtgatgactgtgggaaaggcttttcaagtatgctagaatattgcaagcatttaaattcacatttatctgaagggatttatttatgtcaatattgtgaatattcaacaggacaaattgaagatcttaaaattcatctagatttcaagcattcagctgacttgcctcataaatgtagtgactgcttgatgaggtttggaaatgaaagggaattaataagtcaccttccagtccatgagacaacttgattattctctttaacttacagaatgttagtttaaaataataaattcatcctttttttggagatgattaaatggatgattgtaaacacaacttatgaaatctgcctttaacaagtaacttttttaaattataaaattttattggcattgctccattttctgtatataaatatatctttaatgtggtattttcaattgcgtgatagtttgtagtttcaaccactcttggtgactgtcatcctgtttcttccatattctctgatttcatgaattgaaaagaaacaaatgtattgaagaagtgagctacagttttccttccttaaccatgggtgctagtaactttttaaaactcaagacaagattagttttttatgtgtgaagtcattaaattattacacgaccagaactaaaatgcaatatacagttaagtccacggatactcccattaatgagaaataacactaggaagccactattacaggaagaaaagatttggttttcatggcagtctgtttttttaaaaaaaaatttttgagccactatctattgttgaatattttaagatgggatgagggaggaactaataagggcttacacaataaaaaataactatatcataactcattcataacttgatgtttcattttctgttgaggaaccataaattcattcacagacttaatatttttttcttagagatggtctcgttctgttgtccaggatggagtgcagtggttgatcatagctcccgggccgtagtctcccaggctcgagcaatcctcccacttcaccctcctgcatagctaggactacaggcatgtggcaccatgcccgctaagtttttaaatttcttgtagagatgagatctcgctatgttgcccaggccagtctcaaactcctggactcaagcaatcctcccaccttggccttccaaatcactgggattataggcatgagccattatgcctgactcttgcccaaatttctgatgtcaaattgttcattgacagaaaacccactgaagtatttaaagttaggaagatctgggagataggggttgctggcatgaaaatgtataacttacaacatttattaataaaatgataaattagc

SEQ ID NO: 2499 - DNA, 3293 bp, Homo sapiens
ctaaagctttcagttataagaaaggtcagcattggaaatttcaaactttggaggaatcttttgaatgtgatggatctggacaaggtttatatgataagacaatttgtattacacctcagagttttctaacaggagaaaagtcctgtaaggatgatgaatttagaaaaaaactttgataaaaccactttatttaaccacatgagaactgacaaaagggggaaatgctctgatcttaatgaatatgggacatcctgtgacaaaaccaccgctgttgaatacaataaagttcacatggctatgacacactatgagtgtaatgaaagggggattaatttcagtaggaagtcacccctcactcaatctcagagaactattacaggatggagtgcttttgaaagcaataaatgtgaagaaaattttagccagagctcagcccatatagtacatcagaaaacacaagctggagataaatttggtgaacataatgaatgtacagatgccctctaccagaaattagactttacagcacatcagagaattcacacagactttacagcacatcagaaattctacctttctgatgaacatgggaaatgcagaaaatccttttactggaaagcacacctcattcagcatgagaggccccactcaggagagaaaacttaccaatatgaggaatgtgcaaaatccttttgttcaagttcacatcctattcagcatcctggaacttatgtgggattcaaactttatgaatgtaatgaatgtgggaaagctttctgtcagaattcaaacctcagtaaacatctgagaattcacacaaaagagaaaccttgtgataacaatggctgtgggagatcttacaagtcacccctcataggacaccagaaaacagatgcagagatggaactctgtggtggcagtgaatatgggaagacatcacatctcaaaggacatcagagaattctcatgggggagaaaccctatgaatgtattgaatgtgggaaaactttctccaagacatcacatctcagagcacatcagagaattcacacaggtgaaaaaccctatgaatgtgttgaatgtgagaaaactttctctcacaagacacacctcagtgtacatcagagagttcacacaggggagaaaccctatgaatgtaatgactgtgggaaatcttttacctataactcagccctgagagcacatcaaagaattcacacaggtgagaagccctatgaatgcagtgactgtgagaaaacttttgcccataattcagccctcagagcacatcatagaattcacacgggggagaaaccttatgaatgtaatgaatgtggaaggtcttttgcccatatttctgttctcaaggcacatcaaagaattcacacaagggagaaaccctatgaatgtaatgaatgtgggagatctttcacctacaattcagccctgagagcacatcagagaattcacacaggtagaaaaccctatgaatgtagtgactgtgagaaaacttttgcccataattcagccctcaaaatacatcagagaattcacacgggggagaaaccctataaatgtaatgaatgtgagaaaacatttgcccataattcagcccttagagcacatcagaatatccacacaggggagaaactctatgaatgtagtgaatgtggaaaaacttttttccagaagacacgcctcagtacacatcggagaattcacacaggggagaaaccctatgaatgtagcaagtgtgggaaaactttctcccagaaatcatacctcagtggacatgagagaattcacacaggggaaaaaccgtatgaatgtaacgtatgtgggaaaacttttgtctataaggcagccctcatagtgcatcaaagaattcacacaggggagaaaccctatgaatgtaacgaatgtgggaaaactttctcccaaagaacacacctctgtgcacatcagagaattcatactggggaaaaaccctatgagtgtaatgaatgtgggaaaacgtttgctgataattcagccctcagggcacatcacagaattcacacaggggagaaaccctatgaatgtaatgactgtgggaagactttctccaagacatcacatctcagagcacatcttagaactcgctcaggggagaagccctatgaatgcagtgaatgtgggaaaaccttctctgagaagtcatatgttagtgcacatcagagagttcatacgggggagaaaccctatgaatgtaatgtatgtgggaagccatttgcccataattcaaccctcagagtacatcaaagaattcacacaggggagaaatcctatgaatgtaatgattgtgggaaaacgttctcccagaaatcacaccttagtgcacaccagagaattcacacaggggagaaaccctatgagtgtaatgaatgcgggaaagcttttgcccaaaattcaactctcagagtacaccagagaattcacacaggggagaaaccctatgaatgtgatgaatgtgggaaaacttttgtccgtaaggcagctcttagggtacatcacaccagaatgcataccagagagaaaaccctagcatgtaatggatttgggaagtcctgagggaatgcataccttaccacataacacgtagtgcagaaactcatgtgacataggctgggaacttgtttcccttatccatttcctttttcattaggctcatagtttgtggaaaaatcccaatatgccgtttattcaggtggggctgaccatgggatatggtgctaatgatatatattacatttactcttggcccttaaaaaaaaaaaagaaaaaccctcacagtcttcctggttcataatatggatttggaggttatttctgcagcaaacttgggtcctgtgtgttcaaaaccataaagcacaaggtcaaggaagctagagtctgaaaaacgaacaattcacttccaggtcttcatcagggttttgtttttgttgctttaaagcaagagttaagtttatagtctgttaagctcttacaaatttggcttattagttaaatggacgtagtttagcttaaactttatgttagagtgagatgaaaccctatgaatataatcagttttagaaaaactaatcagtttattgtgcatcagagacgtcacatgaagaagaaaacttgttgacatccaggatgatcaggagccttcattaaaacagaaattttagggaaaaccacaaaaaccttcgtaaagtgaattgcattaaacatcaattataataaaatttcatattttgaataaatga

SEQ ID NO: 2500 - DNA, 3292 bp, Homo sapiens
ctaaagctttcagttataagaaaggtcagcattggaaatttcaaactttggaggaatcttttgaatgtgatggatctggacaaggtttatatgataagacaatttgtattacacctcagagttttctaacaggagaaaagtcctgtaaggatgatgaatttagaaaaaaactttgataaaaccactttatttaaccacatgagaactgacaaaagggggaaatgctctgatcttaatgaatatgggacatcctgtgacaaaaccaccgctgttgaatacaataaagttcacatggctatgacacactatgagtgtaatgaaagggggattaatttcagtaggaagtcacccctcactcaatctcagagaactattacaggatggagtgcttttgaaagcaataaatgtgaagaaaattttagccagagctcagcccatatagtacatcagaaaacacaagctggagataaatttggtgaacataatgaatgtacagatgccctctaccagaaattagactttacagcacatcagagaattcacacagactttacagcacatcagaaattctacctttctgatgaacatgggaaatgcagaaaatccttttactggaaagcacacctcattcagcatgagaggccccactcaggagagaaaacttaccaatatgaggaatgtgcaaaatccttttgttcaagttcacatcctattcagcatcctggaacttatgtgggattcaaactttatgaatgtaatgaatgtgggaaagctttctgtcagaattcaaacctcagtaaacatctgagaattcacacaaaagagaaaccttgtgataacaatggctgtgggagatcttacaagtcacccctcataggacaccagaaaacagatgcagagatggaactctgtggtggcagtgaatatgggaagacatcacatctcaaaggacatcagagaattctcatgggggagaaaccctatgaatgtattgaatgtgggaaaactttctccaagacatcacatctcagagcacatcagagaattcacacaggtgaaaaaccctatgaatgtgttgaatgtgagaaaactttctctcacaagacacacctcagtgtacatcagagagttcacacaggggagaaaccctatgaatgtaatgactgtgggaaatcttttacctataactcagccctgagagcacatcaaagaattcacacaggtgagaagccctatgaatgcagtgactgtgagaaaacttttgcccataattcagccctcagagcacatcatagaattcacacgggggagaaaccttatgaatgtaatgaatgtggaaggtcttttgcccatatttctgttctcaaggcacatcaaagaattcacacaagggagaaaccctatgaatgtaatgaatgtgggagatctttcacctacaattcagccctgagagcacatcagagaattcacacaggtagaaaaccctatgaatgtagtgactgtgagaaaacttttgcccataattcagccctcaaaatacatcagagaattcacacgggggagaaaccctataaatgtaatgaatgtgagaaaacatttgcccataattcagcccttagagcacatcagaatatccacacaggggagaaactctatgaatgtagtgaatgtggaaaaacttttttccagaagacacgcctcagtacacatcggagaattcacacaggggagaaaccctatgaatgtagcaagtgtgggaaaactttctcccagaaatcatacctcagtggacatgagagaattcacacaggggaaaaaccgtatgaatgtaacgtatgtgggaaaacttttgtctataaggcagccctcatagtgcatcaaagaattcacacaggggagaaaccctatgaatgtaacgaatgtgggaaaactttctcccaaagaacacacctctgtgcacatcagagaattcatactggggaaaaaccctatgagtgtaatgaatgtgggaaaacgtttgctgataattcagccctcagggcacatcacagaattcacacaggggagaaaccctatgaatgtaatgactgtgggaagactttctccaagacatcacatctcagagcacatcttagaactcgctcaggggagaagccctatgaatgcagtgaatgtgggaaaaccttctctgagaagtcatatgttagtgcacatcagagagttcatacgggggagaaaccctatgaatgtaatgtatgtgggaagccatttgcccataattcaaccctcagagtacatcaaagaattcacacaggggagaaatcctatgaatgtaatgattgtgggaaaacgttctcccagaaatcacaccttagtgcacaccagagaattcacacaggggagaaaccctatgagtgtaatgaatgcgggaaagcttttgcccaaaattcaactctcagagtacaccagagaattcacacaggggagaaaccctatgaatgtgatgaatgtgggaaaacttttgtccgtaaggcagctcttagggtacatcacaccagaatgcataccagagagaaaaccctagcatgtaatggatttgggaagtcctgagggaatgcataccttaccacataacacgtagtgcagaaactcatgtgacataggctgggaacttgtttcccttatccatttcctttttcattaggctcatagtttgtggaaaaatcccaatatgccgtttattcaggtggggctgaccatgggatatggtgctaatgatatatattacatttactcttggcccttaaaaaaaaaaaagaaaaaccctcacagtcttcctggttcataatatggatttggaggttatttctgcagcaaacttgggtcctgtgtgttcaaaaccataaagcacaaggtcaaggaagctagagtctgaaaaacgaacaattcacttccaggtcttcatcagggttttgtttttgttgctttaaagcaagagttaagtttatagtctgttaagctcttacaaatttggcttattagttaaatggacgtagtttagcttaaactttatgttagagtgagatgaaaccctatgaatataatcagttttagaaaaactaatcagtttattgtgcatcagagacgtcacatgaagaagaaaacttgttgacatccaggatgatcaggagccttcattaaaacagaaattttagggaaaaccacaaaaaccttcgtaaagtgaattgcattaaacatcaattataataaaatttcatattttgaataaatg

SEQ ID NO: 2501 - DNA, 4025 bp, Homo sapiens
gcatgtgtaaacccagccccacctcctgccgtctgccctcccgggcctgaaagggacacggtgtccgagtctttaggtctgcgcgggagccgaggctgcgcacctgggctgaacctccacagtcctctacactcttccaggagcagcagaaaatgaacatgtctcaggcatcagtgtcattccaggacgtgactgtggaattcacccgggaggagtggcagcacctgggccctgtcgagaggacgctgtacagagatgtgatgctggagaactacagccacctcatctcagtgggatattgcattactaaacctaaggtgatctccaagttggagaaaggagaagagccatggtctttagaagatgaattcctgaaccagaggtacccagggtattttaaagttgatcacatcaaagggatccgggaaaaacaagaaaaacctctgtggcaagaaatattcatcagtgatgctgacaaaacattgagtaaagaaggacagaaagttttagaaaaaccatttaatctggaaatagctccagagctttcagaaaaaatatcctgtaaatgtgactcacacagaatgaatttgccagttgcttctcaattaattataagtgaaagaaaatattcaagaaagaagactgaatacatgaatgtgtgtgagaaactgcagcttgatattaagcatgagaaagctcatgctgaagagaaatcttatgaacatggtgaaaatgctaaagctttcagttataagaaagatcagcattggaaatttcaaactttggaggaatcttttgaatgtgatggatctggacaaggtttatatgataagacaatttgtattacacctcagagttttctaacaggagaaaagtcctgtaaggatgatgaatttagaaaaaactttgataaaatcactttatttaaccacatgagaactgacacaagggggaaatgctctgatcttaatgaatatgggacatcctgtgacaaaaccaccgctgttgaatacaataaagttcacatggctatgacacactatgagtgtaatgaaagggggattaatttcagtaggaagtcacccctcactcaatctcagagaactattacaggatggagtgcttttgaaagcaataaatgtgaagaaaattttagccagagctcagcccatatagtacatcagaaaacacaagctggagataaatttggtgaacataatgaatgtacagatgccctctaccagaaattagactttacagcacatcagagaattcacacagaagataaattctacctttctgatgaacatgggaaatgcagaaaatccttttaccggaaagcacacctcattcagcatcagaggccccactcaggagagaaaacttaccaatatgaggaatgtgcaaaatccttttgttcaagttcacatcctattcagcatcctggaacttatgtgggattcaaactttatgaatgtaatgaatgtgggaaagctttctgtcagaattcaaacctcagtaaacatctgagaattcacacaaaagagaaaccttgtgataacaatggctgtgggagatcttacaagtcacccctcataggacaccagaaaacagatgcagagatggaactctgtggtggcagtgaatatgggaagacatcacatctcaaaggacatcagagaattctcatgggggagaaaccctatgaatgtattgaatgtgggaaaactttctccaagacatcacatctcagagcacatcagagaattcacacaggtgaaaaaccctatgaatgtgttgaatgtgagaaaactttctctcacaagacacacctcagtgtacatcagagagttcacacaggggagaaaccctatgaatgtaatgactgtgggaaatcttttacctataactcagccctgagagcacatcaaagaattcacacaggtgagaagccctatgaatgcagtgactgtgagaaaacttttgcccataattcagccctcagagcacatcatagaattcacacgggggagaaaccttatgaatgtaatgaatgtggaaggtcttttgcccatatttctgttctcaaggcacatcaaagaattcacacaggggagaaaccctatgaatgtaatgaatgtgggagatctttcacctacaattcagccctgagagcacatcagagaattcacacaggtagaaaaccctatgaatgtagtgactgtgagaaaacttttgcccataattcagccctcaaaatacatcagagaattcacacgggggagaaaccctatgaatgtaatgaatgtgagaaaacatttgcccataattcagcccttagagcacatcagaatatccacacaggggagaaactctatgaatgtagtgaatgtggaaaaacttttttccagaagacacgcctcagtacacatcggagaattcacacaggggagaaaccctatgaatgtagcaagtgtgggaaaactttctcccagaaatcatacctcagtggacatgagagaattcacacaggggaaaaaccgtatgaatgtaacgtatgtgggaaaacttttgtctataaggcagccctcatagtgcatcaaagaattcacacaggggagaaaccctatgaatgtaaccaatgtgggaaaactttctcccaaagaacacacctctgtgcacatcagagaattcatactggggaaaaaccctatgagtgtaatgaatgtgggaaaacgtttgctgataattcagccctcagggcacatcacagaattcacacaggggagaaaccctatgaatgtaatgactgtgggaagactttctccaagacatcacatctcagagcacatcttagaactcgctcaggggagaaaccctatgaatgcagtgaatgtgggaaaaccttctctgagaagtcatatgttagtgcacatcagagagttcatacgggggagaaaccctacgaatgtaatgtatgtgggaagccatttgcccataattcaaccctcagagtacatcaaagaattcacacaggggagaaatcctatgaatgtaatgattgtgggaaaacgttctcccagaaatcacaccttagtgcacaccagagaattcacacaggggagaaaccctatgagtgtaatgaatgcggaaaagcttttgcccaaaattcaactctcagagtacaccagagaattcacacaggggagaaaccctatgaatgtgatgaatgtgggaaaacttttgtccgtaaggcagctcttagggtacatcacaccagaatgcataccagagagaaaaccctagcatgtaatggatttgggaagtcctgagggaatgcataccttaccacataacacgtagtgcagaaactcatgtgacataggctgggaacttgtttcccttatccatttcctttttcattaggctcatagtttgtggaaaaatcccaatatgccgtttattcaggtggggctgaccatgggatgtggtgctaatgataaatattacatttacccttggcccttaaaaaaaaaaaagaaaaaccctcacagtcttcctggttcataagatggatttggaggttatttctgcagcaaacttgggtcctgtgtgttcaaaaccatagagcacaaggtcaaggaagctagagtctgaaaaacgaacaattcacttccaggtcttcatcagggttttgtttttgttgctttaaagcaagagttaagtttatagtctgttaagctcttacaaatttggcttattagttaaatggacgtagtttagcttaaactttatgttagagtgagatgaaaccctatgaatataatcagttttagaaaaactaatcagtttattgtgcatcagagacgtcacatgaagaagaaaacttgtcgacatccaggatgatcaggagccttcattaaaacagaaattttagggaaaaccacaaaaaccttcgtaaagtgaattgcattaaacatcaattataataaaatttcatattttgaataaatgacatttttcct

SEQ ID NO: 2502 - DNA, 2671 bp, Homo sapiens
ctgcgcgcgggcgggcgggctatggcgcaggcgggttgtggggccggcgctggtggcggggcccggtgcatggcggtctgtcggcggagtcgccctcgggggctgtcagatttgtgacccagaaggaaatctctgacctcagctgtggctcttggtgctggccagaagccaacttcatgtctgagtgcacgagcagcagtttgccatggagagcttggggctgcacacggtgacccttagtgatgggacaacagcctacgtccagcaagctgtcaaaggagagaagcttcttgaagggcaggtgatccagctcgaggatgggaccaccgcatacattcaccaggtgacggtacagaaagaagctctctcctttgaggatggtcagcctgtgcagctggaagatggcagcatggcttacatacaccgcacacccagagaaggctatgaccccagcaccctggaagccgtccaactggaagatggctccactgcctacattcaccaccctgtggctgtgccatcggagagcaccatcctggccgtacagacagaggtgggcttggaggacctggcagcagaggatgatgagggcttcagtgcagacgcagtggtggccctggagcagtatgccagcaaggttcttcatgacagccagattccccgtaatggaaaagggcagcaagttggagacagagcattccgctgtggctacaagggctgtgggcgtctctacaccaccgctcatcacttaaaggtgcatgaacgagctcatacaggtgaccgtccatacagatgtgacttccccagctgtggaaaggcctttgccacaggctatggactgaagagccacgttcgtacccacactggtgagaaaccatacaagtgcccagaggagctgtgcagcaaggccttcaagacctcaggagacctgcagaagcatgtccgtacccacactggtgaacgcccgttccagtgcccttttgagggctgtggccgctccttcaccacatctaacatccgcaaggtacatgtgcgcacccacacaggcgagaggccctacacctgcccggagccccactgtggccgcggcttcaccagcgccaccaactataagaatcacgtgcgcatccacacaggggagaagccatacgtttgcacggtgccaggctgcgggaaacgcttcaccgagtactcgagcttgtataagcaccacgtggtgcacacacactgcaagccctacacctgcagcacctgcggcaagacctaccggcagacctccaccttggccatgcacaagcgcagtgcccatggcgagctggaggccacggaggagagtgagcaggccctctatgagcagcagcaacttgaggccgcctctgcagccgaggagagtccgccacccaaacgaccccggatagcttacctttcggaggtgaaggaagagagagatgacatcccagcccaggtggcgatggtgactgaagaagatggggccccccaggtggctctgatcactcaggatggtgcccagcaggtcagcctgtccccggaagacctgcaggccctggggagtgccatcagtatggtcacccagcacggcagcaccaccctcaccatccccagtcctgatgccgacctggccacatctggcacacatacagtcaccatggtcagcgccgatggcacccagacgcagcccgtcacaatcattacctctggggctgtggtggctgaggactcaagtgtagcatctcttcgtcatcaacaggtggcactgttggccacagccaacggaacgcacattgcagtgcagctggaggaacagcagaccttagaggaggccatcaatgtggccactgcggccatgcagcaaggggctgtgaccctggagacaacagtgtcggagagtggctgctgagtccaagagggctgggtcccacaccatgctggaggaagtgccatctgcatggccactcttgcccccaagggcccaggctgtggctgacacatagaaggtggccacataggtctctggggtgagaagacagcaagaaaactgcctaactgaagggaatgggggccctgctcaagaagggggccaggcagctggaatcaggggagtgcatcatcctcgggagctgacaacagccaggctacaccagggcacccgcctctcaaaatcagctgggcgcccactctcctcctaaagaacacccttctggccctcagtctgttccccttctcaggtagagattggggctgctatggggactggccctgtagggttgagccacagacagctcttcagcccagtagcagtggagcaggccctgtcctgccctcccagcaataaccacctccctggaggccagctgagatgcctggctacttggcaccagggacttcctgacaccacagtcaattaattcctcaggggcctgtggctggagaaaaggtgcccagcccccaccactcctcagctgccccccaacctctctatggcagagaggcagggagtggccctgtacatagactgctggggattgggtttgatttgttttgtttttttaaattccattttgataatttttttcctgctctgggtggtggtggcacatggatgaatgagtatttaataaaagttccaaatttcaaaaaaaaaaaaaaaaaa

SEQ ID NO: 2503 - DNA, 4633 bp, Homo sapiens
gccctccattgtctccacggcggcgaggagcgccggcgagcgcagcccgggaccgagcggggcggcgcggctggcggggccggcggcggctgaagcgagagcgcgacgcgacgcgaccgcggcttcccgagctgcgcctggccgcccagcgccgcggcccgcccgaggcctggaggggtccgggccgccgtccatggtcgcggcgtcctgaggcgggggacgcgcccggcgcccccggccctcctccgcctcctcccgcggggcgggcggcctcctccggcgcctccccgcgcccgcccgccgctcgccgccgcctccctccctccttccctgcggctcccccggctttcggagcccgggggcggcctgtggcgcgcggagcccgcgccggactgcgcctctttggaccttgaggggaaacatgcgtttgccttggatcgtttgaaattctgagtttgggatccccgcccgcccgcctgcctcttccgccccgcgggttttttccttttttccttttgctttttttccttttctccctccgggtctcctttttgactccctccccctttatgctcgcccagccctccccctgctgctgagaagtgggggagggtctcggcctccaggttcccgccccaccggggcccgggcgagcatggggggcaagcagagcacggcggcccgctcccggggccccttcccgggggtctccaccgatgacagcgccgtgccgccgccgggaggggcgccccatttcgggcactaccggacgggcggcggggccatggggctgcgcagccgctcggtcagctcggtggcaggcatgggcatggaccccagcacggccgggggggtgccctttggcctctacacccccgcctcccggggcaccggcgactccgagagggcgcccggcggcggagggtctgcgtccgactccacctatgcccatggcaatggttaccaggagacgggcggcggtcaccatagagacgggatgctgtacctgggctcccgagcctcgctggcggatgctctacctctgcacatcgcacccaggtggttcagctcgcatagtggtttcaagtgccccatttgctccaagtctgtggcttctgacgagatggaaatgcactttataatgtgtttgagcaaacctcgcctctcctacaacgatgatgtgctgactaaagacgcgggtgagtgtgtgatctgcctggaggagctgctgcagggggacacgatagccaggctgccctgcctgtgcatctatcacaaaagctgcatagactcgtggtttgaagtgaacagatcttgtccggaacaccctgcggactgacctgcgggcttgcttgctgactcctctcaaagggacagagcgcccctgctccagggaggaggctcaccggaccctggggcagagctgagcttgggacaccagcgggaacagggcaccccttctgcactgacttccagatcatggttctcccttcctccctgaggacaccaaattggatgagagcaagtttgagagaagaatgaatcaactgctatccttcccctcacccctcagcccaggagggaaagggcattttctttttcatctttgaaaggcattgtgggtctgtctttaaagtgtttacaaaaaaaaattatataaaaaaaaagtctagtgtcgactggtgttttccctcgtgatgtttacagcttgctgtttgctgcccagccataacccactcagtgacagacgaacacagctaaggcctcgctgccagccttctgacggcgggcgagcacacggtctcttcccctgccccaactggccctctccaccaccaacttctctactttgggtttgtttggttttttccctctatttttctggctggttttttgctcttttctccccttgagaccctaatatcttgacttcattgccaaaaaacaacccattgagaactttcttcctactgatcccatctcttttcccttctttcctcctggttccggtcagttcagaggatttaacaatcacaagtgtcctgcaaaaatgcctgaacattattcttaggccctcgtggattttttttttcagaaaacttaaacaaaaaaagacttactaagaaatatgtacagctacccctgttttcaggcactatgtttgagaacattttagccattgatgttcacacgtggcatcagcccatgcaagataggtttctgtatttatatattaaaatacaaaaaaaaacttataaaatgtttaaaaaaatgttcaaagcttgggagaaaagctttcttcattagtcaaggtgttttgatatggtattaaaatgtctaataaaagatggcactgcgtgattttattttaatgaagtgttatacaatcaagaaatgggggcaagggcctgccccccactccctcacctacctccttagcattccttcaggctgctactcggggctccaggtgtgtgaattggtcctcagatagtcaggcctgggtggagggagtggcaagtcaggcgtgcctcctacaagcttcctaacctcttaagcatcatggaaccagtcagccctctgtggagtcattgtgccggacctctgaaaagatctgcaggggccaagatgttgcagccaccggaggctgcaaggatgtgggttcttccaggtgtgggcccagcccccctccttccagcctttgctccccatcccacgttccactcgccctgcctgttgttcagtttgcgtctcagtgctgactcacgggcatgcttcattgaggcccaggaagaggccctggtttggggctgtgccagctcagagcccttgaaccagaaccaactgctcaggctcacaaaagttggcaaaatgcgggctgggcaggcagctcggggcagggagcagcagtgcaggcctggcctgtgtccccgtgcccagcgggctcccggagcagcattccagagcctcctgcagagccagcgaaggaaagctctagagggagacgactccaccgcctctctgctctgacccttctcaggcccgcctgatgtgctggaccatccccctgctgccacggcccctggctccgcagtcaccctccatcagatgcttccagaagcacctactctgtgcaagggcattcacaacaggccagtgggcaaacgtgagccagggccagcggagaaacactaaagaagactcggtggttcagagcctgggtctcagcgcgggacccgtctggggtgaagaccttggggctgttgtgagtcggtggcaggaacgtgggctctagactgtgcattcaggctctcctacttggcagaatgatcttggggaaacgacttcatctgaacttcagatatttcacatgtgaagcggggacaaaaccatgcagctcagaggtccctgtgggggctgggggagctgccctgcaggtcttggcacatgcacagcaggctccccatagctttgtcaccacaaagggcactgttctattcacagcacctcctgcttctgcctggcaactgtgtctccctgtgctatatttaattccaccagcaaagctggcgaggcagggcccagccctgaaggagatctccttgcctgacccctggacctggaaatggaggcttcatgtgcccgccttggcggcttaagcctgctgctttggcagtgccatgggtgagccgagcagctgtgaggtgggtggggcagggctgtagcccacgccgggtgctattccaggctctaggggctggtgctcatccccacccccagcgacttccgtcctacctggcatgctgcagccctctgccggctgtggtgtcctctgaatttggacccaggttgcctgctcttgttgtgggggtgggattggggctgtctgtgtttcccaggtggagctcatgtttgtgatcctctatctggacagctctccagaatcctgtgttgcccctgttctgcctttctgggatgggagagaaggtgagggagccggcgagcaggttctaccctctctgctaagggcctagcacactttgatgaggttcctggacgtgagaccctcacaaagaccaaccattcctctaatagccatttaacggtactgcagttcatgggaaaatgtcctcattcttaggagatagatgctggattatataggtgaatgccttcaagaaatgtgtaatttaattccaaatagttccccccaaaatacacaaagcaaataaggccaaaatgttcattgttgaatctgcagtggctggtatttcagtgaacagtgtacttgttctttcaacttttctgtatgtttggaatttttcttaataaaagattgtgggaaatggtcatttgctgagcgcctcctagttgccaggcactggagggcgcatcaaagaagagtcctacccaggagggagagcgcagctgctgcaggattctcgcctggaagagtgggtggctggctggctggctggaaggggaggggcgagagggctgtctcggtgatgagcacacgcgtgctggggtggtttggggagagggctgagatttgtcaccagtgagcccttggcacggtctctgctccccaccagggcagcacgggacagaaacgtcacggaggagtagcctc

SEQ ID NO: 2504 - DNA, 1938 bp, Homo sapiens
cccagaccgagaaggtcggaggcagaagccgggaaggagacttctgaatgaacagtgaatctattactgaggaaaaccagaggaagcctgtgtagataggtatcaattagataccagctactggaagagctttctcagagactgattaaaaaattctccactagatatggctgcaaattgcacatcctcatggagtctaggagaatcctgcaacagacctgggttggagctgccacggtctatggcatcctcagaaactcaacttggaaatcacgacgtggaccctgagatttctcacgtgaacttcaggatgttcagctgcccgaaggagtcggaccccatccaggctctgaggaaactcactgagctgtgccatctgtggctgaggcccgacctccacaccaaagagcagatcctggacatgctggtgatggagcagttcatgatctccatgccccaggagctccaggtcttagtcatgatgaacggtgtgcagagctgcaaagacctggaggacctgctacgaaataacagaagacccaagaaatggtctgtggtcaccttccacggaaaggaatatattgtgcaggactcagatatcgagatggctgaagccccctccagtgtcagagatgatctgaaagacgtgtccagccaacgggcctcctcggtgaaccagatgcgtccaggggaaggccaggcccaccgagagctgcagatcctgcccagggtccctgcattgtccaggaggcagggagaggactttctgctacacaagagtattgacgtaacaggtgacccaaagtctctgagacccaagcagaccttggagaaggatctgaaggaaaacagggaagagaacccaggactgacatccccagagcctcagcttccaaagagtcccacagatctggtgagagcaaaggaggggaaggaccccccaaaaatagcctctgtggaaaatgtggatgctgacacaccttctgcctgcgttgtggagagagaagcttcgactcacagcgggaacagaggagacgctctgaatctgagcagtcccaaaagaagcaaaccagatgcctcctccatttcccaagaagagcctcaaggagaagccacacctgtgggcaacagagaatccccgggacaagctgggatgaattcaattcattccccaggccctgcgagcccagtcagtcacccggatggccaagaagccaaggcactgccgccctttgcatgtgacgtgtgcgagaagaggtttacgtgtaattccaagctagtcatccacaagagatcacacacaggcgagagactctttcaatgtaatctctgtgggaagcgcttcatgcagcttattagcctccaatttcaccagcgaacccacactggcgagaggccctacacgtgtgacgtctgccagaagcagttcacccagaagtcctacttgaagtgtcacaagagaagccacacaggggagaagcccttcgaatgtaaagactgcaagaaagttttcacctacagggggagcctgaaggagcaccagcgcatccactccggagagaaaccctacaaatgttccaagtgtccaagagccttcagtcggctgaaattgttaagacgccaccagaaaacacatccagaagctacttctcagtgattgcataatccggtctatgccttctgcaccaagaagaagtgaatgatatttttcatcaatgttatcagatgacatttgacacatgcaagggcgtctgacacacagagggagtgccctagatatgaattgccaggatgtttgagtaaatatgtgtcctccccactgagctttgttttctgtttcattatgtccattgttttcttataggtttattttggtttgtgttgctgttcttccaataaacgatcatcttattagttttcaaaaaaaaaaaaaaaaaa

SEQ ID NO: 2505 - DNA, 4299 bp, Homo sapiens
tgacagcggaggcggcggcggctgcaggctccgagccgtaggagccggatcgggggaggggccgggcccaggagcctcagccccgccggcagccctaagggcaaggtaaccgccacggggtccccgtcgcgaccccctccctcccggagctcccgtccccgggatcccaagctccgccccgccgacccccgtctcccctggaccccggctctagcctgacgagatccccaacctcctgaggtgctctggccccggattctcccgggctgcattctctgctcctcctcgcctgcgaagcatcacgtccgcttcccgacgctgagggcagccccgtccagggcagtggctctgccaatgatcctgtgagtattcaggaatcactgttgcccctggggatccttgtcctggagtggcccacctgcttgcccccagcatggcgtccgacactcccgagtcgctgatggccctctgtactgacttctgcttgcgcaacctggatggcaccctgggctacctgctggacaaggagaccctgcggctacatccggacatcttcttgcccagcgagatctgtgaccggctcgtcaatgagtatgtggagctggtgaacgctgcctgtaacttcgagccacacgagagcttcttcagcctcttttcggacccccgcagcacccgcctcacgcggatccacctccgtgaggacctggtgcaggaccaggacctggaggccatccgcaagcaggacctggtggagctgtacctgactaactgcgagaagctgtccgccaagagcctgcagacactgaggagcttcagccacaccctggtgtccttgagcctcttcggctgtacaaacattttctatgaggaggagaacccagggggctgtgaagatgagtacctcgtcaaccccacctgccaggtgctggttaaggatttcaccttcgagggcttcagccgcctccgcttcctcaacttgggccgcatgattgattgggtccctgtggagtccctgctgcggccgcttaactccctggctgccttggacctctcaggcattcagacgagcgacgccgccttcctcacccagtggaaagacagcctggtgtccctcgtcctctacaacatggacctgtccgacgaccacatccgggtcatcgtgcagctgcacaagctgcgacacctggacatctcccgagaccgcctctccagctactacaagttcaagctgactcgggaggtgctgagcctctttgtgcagaagctggggaacctaatgtccctggacatctctggccacatgatcctagagaactgcagcatctccaagatggaagaggaagcggggcagaccagcattgagccttccaagagcagcatcatacctttccgggctctgaagaggccgctgcagttcctcgggctctttgagaactctctgtgccgcctcacgcacattccagcctacaaagtaagtggtgacaaaaacgaagagcaggtgctgaatgccatcgaggcctacacggagcaccggcctgagatcacctcgcgggccatcaacttgctttttgacatcgcccgcatcgagcgttgcaaccagctgctgcgggccctgaagctggtcatcacggccctcaagtgccacaaatatgacaggaacattcaagtgacaggcagcgccgctctcttctacctaacaaattccgagtaccgctcagagcagagtgtgaagctgcgccggcaggttatccaggtggtgctgaatggcatggaatcctaccaggaggtgacggtgcagcggaactgctgcctgacgctctgcaacttcagcatccccgaggagctggaattccagtaccgccgggtcaacgagctcctgctcagcatcctcaaccccacgcggcaggacgagtctatccagcggatcgccgtgcacctgtgcaatgccctggtctgccaggtagacaacgaccacaaggaggccgtgggcaagatgggctttgtcgtgaccatgctgaagctgattcagaagaagctgctggacaagacatgtgaccaggtcatggagttctcctggagtgccctgtggaacatcacagatgaaactcctgacaactgcgagatgttcctcaatttcaacggcatgaagctcttcctggactgcctgaaggaattcccagagaagcaggaactgcataggaatatgctaggacttttggggaatgtggcagaagtgaaggagctgaggcctcaactaatgacttcccagttcatcagcgtcttcagcaacctgttggagagcaaggccgatgggatcgaggtttcctacaatgcctgcggcgtcctctcccacatcatgtttgatggacccgaggcctggggcgtctgtgagccccagcgtgaggaggtggaggaacgcatgtgggctgccatccagagctgggacataaactctcggagaaacatcaattacaggtcatttgaaccaattctccgcctccttccccagggaatctctcctgtcagccagcactgggcaacctgggccctgtataacctcgtgtctgtctacccggacaagtactgccctctgctgatcaaagaaggggggatgccccttctgagggacataattaagatggcgaccgcacggcaggagaccaaggaaatggcccgcaaggtgattgagcactgcagtaactttaaagaggagaacatggacacgtctagatagaggcctccgtccccatggccgccaccgctctggaccacaggcggggaggaagcatgctcaagcagcccagcgggcgggccccttccgagggagcctcccacggagtgaagagacatgggggacttttgcacaaccgacgcttttccttaatgttagtgagatatatatatattatatatatatattttttttttggttaggaagtgtgaagttttgtgtgtatgatttctgtgcaaaaacaaaagcaacactcctgagtccttgcagcttccttggccattctcaaacccactcagccttcatcgctgacacacacactcctaccccaaccagactaaatgcctataacgctgtgagtgtccagtccttgtccaggaaactcagatcccggcctggcttcctttcatgagaggagcaggccttggacagcgtatcgagcatcctgacccactgcccctgcctgagaacgccatctcggctcccgggcacagctgatggggtttggggattagaacttaccccactgggtctcccaaaagccttggtgctcccggctgtgggccatctggggcaggaaagtgagccattcctaggctgaggtccaggcagccctgcccctgaagaccctctaggagcagggcacccagtggccctgctgctgtccagccaggcctgcctgaggccacgctgctatggaggctgcctcctagtctcccaccaggtcccaggctgtggaaagccccagcccagggatggtcagaactcgggggcagattccactgccccttctgccaaacacatccagaacctgccctcagccctggaagctagcatcttctggggccaggggcttgcttcctcgctccatagccctcaactgcccaggcgctcccaccagcagaactgagcctgcctcctcctcccagcctgccccgctgcccagaggaccccacgcctctcagaggcagaggtcccatgccagcctttgacccacaacggccacacagccgcctccagaccagcactcggactgccctgcagtggccgcttgggcctccctggcggtcccgccctgccctaggctttaccttggaagcctgagaggcgccggctctcttgctcctccatcgatggacactgcattgcttctcatcggacacttgtggagcgcaggggcctggggagcagcgctaaccctggaggcagcctttgggtgatggctttttcttcccttttcctcccgcgggcctgttttcaggtgttcctagcatttctgcctccaggcaggacggcaggggtgagcagctttgggagagacacctggcctttttctcctggagcctctccctcccggccctgggaagtgggcgcagccctgtgttcccccagcttggcagatgggctgcatgcggcgctcccttccttcccacgctcagcggccccggccagaccctggcagacttcacacctcattgctttaccccctggggcctggggaaatgtctgtactttgggaagtcacagaaatacatttttgtgcaaaatggaaaaaaaaaaaaaaaaaa
